(19) United States
(12) Patent Application Publication
(10) Pub. No.: US 2024/0401032 A1
(43) Pub. Date: Dec. 5, 2024

(54) COMPOSITIONS, SYSTEMS, AND METHODS FOR THE GENERATION, IDENTIFICATION, AND CHARACTERIZATION OF EFFECTOR DOMAINS FOR ACTIVATING AND SILENCING GENE EXPRESSION

(71) Applicant: The Board of Trustees of the Leland Stanford Junior University, Stanford, CA (US)

(72) Inventors: Michael C. Bassik, Stanford, CA (US); Joshua Tycko, Stanford, CA (US); Gaelen T. Hess, Stanford, CA (US); Lacramioara Bintu, Stanford, CA (US)

(21) Appl. No.: 17/997,228

(22) PCT Filed: May 4, 2021
(86) PCT No.: PCT/US2021/030643

§ 371 Date: Oct. 26, 2022

Related U.S. Application Data
(60) Provisional application No. 63/074,793, filed on Sep. 4, 2020.
(60) Provisional application No. 63/019,706, filed on May 4, 2020.

(51) Int. Cl. C12N 15/10

(52) U.S. Cl. CPC C12N 15/1086; C12N 15/1055; C12N 15/1065

(57) ABSTRACT

Provided herein are compositions, systems, and methods for the generation, identification, and characterization of effector domains for activating and silencing gene expression. In particular, high throughput systems are provided to discover and characterize effector domains.

### CROSS-REFERENCE TO RELATED APPLICATIONS

[0001] This application claims the benefit of U.S. Provisional Application No. 63/019,706, filed May 4, 2020 and U.S. Provisional Application No. 63/074,793, filed Sep. 4, 2020, the content of each of the which is herein incorporated by reference in their entirety.

### STATEMENT REGARDING FEDERALLY-SPONSORED RESEARCH

[0002] This invention was made with Government support under contract GM128947 awarded by the National Institutes of Health. The Government has certain rights in the invention.

### FIELD

[0003] Provided herein are compositions, systems, and methods for the generation, identification, and characterization of effector domains for activating and silencing gene expression. In particular, high throughput systems are provided to discover and characterize effector domains.

### BACKGROUND

[0004] Previous efforts to engineer synthetic transcription factors have pulled activation and repressor domains from a small toolbox of previously-discovered effector domains. New methods are needed to expand this toolbox.

### SUMMARY

[0005] Provided herein are compositions, systems, and method for the generation, identification, and characterization of effector domains for activating and silencing gene expression. In particular, high throughput systems are provided to discover and characterize effector domains. In some embodiments, provided herein is a high throughput approach to discover and characterize effector domains that greatly expands the toolbox. These domains satisfy a critical need to engineer enhanced synthetic transcription factors for applications in gene and cell therapy, synthetic biology, and functional genomics.

[0006] In some embodiments, the methods for identification of effector domains comprise: a) preparing a domain library comprising a plurality of nucleic acid sequences each configured to express a fusion protein comprising a protein domain linked to an inducible DNA binding domain; b) transforming reporter cells with the domain library, wherein a reporter cell comprises a two-part reporter gene comprising a surface marker and a fluorescent protein under the control of a strong promoter, wherein the two-part reporter gene is capable of being silenced by a putative transcriptional repressor domain following treatment with an agent configured to induce the inducible DNA binding domain; c) treating the reporter cells with the agent for a length of time necessary for protein and mRNA degradation in the cell; d) separating reporter cells based on presence or absence of the surface marker, the fluorescent protein, or a combination thereof; e) sequencing the protein domains from the separated reporter cells; f) calculating for each protein domain sequence a ratio of sequencing counts from reporter cells not having the surface marker, the fluorescent protein, or a combination thereof to sequencing counts from reporter cells having the surface marker, the fluorescent protein, or a combination thereof; and g) identifying protein domains as transcriptional repressor.

[0007] In some embodiments, the methods for identification of effector domains comprise: a) preparing a domain library comprising a plurality of nucleic acid sequences each configured to express a fusion protein comprising a protein domain linked to an inducible DNA binding domain; b) transforming reporter cells with the domain library, wherein the reporter cells comprises a two-part reporter gene comprising a surface marker and a fluorescent protein under the control of a weak promoter, wherein the two-part reporter gene is capable of being activated by a putative transcriptional activator domain following treatment with an agent configured to induce the inducible DNA binding domain; c) treating the reporter cells with the agent for a length of time necessary for protein and mRNA production in the cell; d) separating reporter cells based on presence or absence of the surface marker, the fluorescent protein, or a combination thereof; e) sequencing the protein domains from the separated reporter cells; f) calculating for each protein domain sequence a ratio of sequencing counts from reporter cells not having the surface marker, the fluorescent protein, or a combination thereof to sequencing counts from reporter cells having the surface marker, the fluorescent protein, or a combination thereof; and g) identifying protein domains as transcriptional activator.

[0008] In some embodiments, the methods further comprise stopping treatment of the reporter cells with the agent and repeating steps d-g one or more times. In some embodiments, steps d-g are repeated at least 48 hours after stopping treatment of the reported cells with the agent.

[0009] In some embodiments, each protein domain is less than or equal to 80 amino acids. In some embodiments, the protein domain is from a nuclear-localized protein. In some embodiments, the protein domain comprises amino acid sequences of the wild-type protein domains from nuclear-localized proteins. In some embodiments, the protein domain comprises mutated amino acid sequences of protein domains from nuclear-localized proteins.

[0010] In some embodiments, the inducible DNA binding domain comprises a tag.

[0011] In some embodiments, the methods further comprise measuring expression level of protein domains. In some embodiments, the expression level is determined by measuring a relative presence or absence of the tag on the DNA binding domain.

[0012] In some embodiments, the reporter cells are treated with the agent for at least 3 days. In some embodiments, the reporter cells are treated with the agent for at least 5 days. In some embodiments, the reporter cells are treated with the agent for at least 24 hours. In some embodiments, the reporter cells are treated with the agent for at least 48 hours.

[0013] In some embodiments, the protein domain is identified as a transcription repressor when log 2 of the ratio is at least two standard deviations from (e.g., higher than) the mean of a poorly expressed negative control.

[0014] In some embodiments, the protein domain is identified as a transcription activator when log 2 of the ratio is at least two standard deviations from (e.g., lower than) the mean of weakly expressing negative control.

[0015] Also provided herein are synthetic transcription factor comprising one or more transcriptional activator domains, one or more transcriptional repressor domains, or a combination thereof fused to a heterologous DNA binding domain. In some embodiments, at least one of the one or more transcriptional activator domains or at least one of the one or more transcriptional repressor domains comprises an amino acid sequence having at least 70% identity to any of SEQ ID NOs: 1-896.

[0016] In some embodiments, the synthetic transcription factor comprises two or more transcriptional activator domains or two or more transcriptional repressors domains fused to a heterologous DNA binding domain.

[0017] In some embodiments, at least one of the one or more transcriptional activator domain comprises an amino acid sequence having at least 70% identity to any of SEQ ID NOs: 563-664. In some embodiments, at least one of the one or more transcriptional activator domain is selected from those found in Table 2.

[0018] In some embodiments, the at least one of the one or more transcriptional repressor domain comprises an amino acid sequence having at least 70% identity to any of SEQ ID NOs: from 1-562 and 665-896. In some embodiments, the at least one of the one or more transcriptional repressor domain is selected from those found in any of Tables 1, 3, or 4.

[0019] In some embodiments, the one or more transcriptional activator domain or the one or more transcriptional repressor domain is identified by the methods disclosed herein.

[0020] In some embodiments, the heterologous DNA binding domain comprises a programmable DNA binding domain. In some embodiments, the DNA binding domain is derived from a Clustered Regularly Interspaced Short Palindromic Repeats associated (Cas) protein. In some embodiments, the DNA binding domain is derived from Transcription activator-like effectors (TALEs) domains.

[0021] Also provided herein are nucleic acids encoding a synthetic transcription factor or an effector domain, as disclosed herein. In some embodiments, the nucleic acid in under control of an inducible promoter. In some embodiments, the nucleic acid in under control of a tissue specific promoter. In some embodiments, the nucleic acid encodes at least one additional transcription factor or effector domain.

[0022] Further provided herein is a composition or system comprising a synthetic transcription factor, a nucleic acid, a vector, or a cell as disclosed herein. In some embodiments, the composition comprises two or more synthetic transcription factors, nucleic acids, vectors, or cells. In some embodiments, the composition further comprises a guide RNA or a nucleic acid encoding a guide RNA.

[0023] Additionally, provided are methods of modulating the expression of at least one target gene in a cell. The methods comprise introducing into the cell at least one synthetic transcription factor, nucleic acid, vector, or composition or system, as described herein. The gene expression of the at least one target gene is modulated when gene expression levels of the at least one target gene are increased or decreased compared to normal gene expression levels for the at least one target gene. In some embodiments, the synthetic transcription factor comprises a Cas protein DNA binding domain and the method further comprises contacting the cell with at least one guide RNA.

[0024] In some embodiments, the cell is in vitro (e.g., ex vivo) or in a subject.

[0025] In some embodiments, the gene expression of at least two genes are modulated.

### BRIEF DESCRIPTION OF THE DRAWINGS

[0026] FIGS. 1A-1G show high-throughput recruitment measures transcriptional repressor activity of thousands of Pfam-annotated domains from nuclear-localized proteins. FIG. 1A—Length of Pfam-annotated domains in human proteins that localize to the nucleus. Domains ≤80 amino acids were selected for inclusion in the library. FIG. 1B—Schematic of screen to identify transcriptional repressors. The repression reporter uses a strong pEF promoter that can be silenced by dox-mediated recruitment of repressor domains. The cells were treated with doxycycline for 5 days, ON and OFF cells were magnetically separated and the domains were sequenced. Dox was removed and additional time points were taken on Days 9 and 13. FIG. 1C—The reproducibility of log 2(OFF:ON) ratios from independently transduced biological replicates is shown and selected domain families are colored. FIG. 1D—Boxplots of top repressor domain families, ranked by the maximum repressor strength at day 5 of a domain within the family. FIG. 1E—Individual validation time course for hit RYBP domain, measured by flow cytometry. FIG. 1F—Additional validation time courses for a panel of repressor domains. Domain length is listed in parentheses, because some domains were tested as the exact 80 AA sequence from the library and some were tested as a shorter sequence trimmed to the region annotated as a domain by Pfam. 1000 ng/ml dox was added on day 0 and removed on day 5. FIG. 1G—Correlation of screen measurements with individual validation flow cytometry measurements for a collection of KRAB effector domains.

[0027] FIGS. 2A-2D show repressive KRAB domains are in younger KRAB-Zinc finger proteins that co-localize and bind to the KAP1 co-repressor. FIG. 2A—KRAB silencing function was compared with the KRAB Zinc Finger protein architecture that the domain is natively found in. FIG. 2B—KRAB silencing function was compared with the KRAB Zinc Finger gene evolutionary age, as determined by finding the most recent ortholog for the gene using its full DNA-binding zinc finger array sequence (ages published in Trono 2017). FIG. 2C—KRAB domains were categorized as silencers or non-silencers and their genomic localization in ChIP-seq datasets was compared with the localization of the co-repressor KRAB-associated Protein 1 (KAP1). FIG. 2D—Repression strength distributions of KRAB domains categorized by whether their KRAB Zinc Finger gene interacts significantly with co-repressor KAP1 in a mass spec dataset (Helleboid 2019). Dot colors are the quintile of the KRAB domain expression level.

[0028] FIGS. 3A-3G show a deep mutational scan of the ZNF10 KRAB domain identifies substitutions that reduce or enhance repressor activity. FIG. 3A—Deep mutational scanning library includes all single and consecutive double and triple substitutions in the KRAB domain from ZNF10. The DNA oligos are designed to be more distinct than the protein sequences by varying codon usage. Red residues differ from the WT sequence. FIG. 3B—All single and triple substitution variants' repressor measurements relative to the WT are shown underneath a schematic of the KRAB domain. FIG. 3C—Average mutation effects on repression at Day 9, compared to sequence conservation from a multiple sequence alignment of all human KRAB domains (computed with ConSurf). FIG. 3D—Correlation of high-throughput measurements with previously published low-throughput data using the CAT assay in a different cell type. FIG. 3E—Individual time-courses of KRAB mutants validate the effects of substitutions in the A/B-boxes and N-terminus. FIG. 3F—For each position at each timepoint in FIG. 3B, the distribution of all single substitutions was compared to the distribution of wild-type effects (Wilcoxon rank sum test). Positions with signed log 10(p)<−5 at day 5 are colored in red (highly significantly decrease in silencing), with signed log 10(p)<−5 at day 9 but not day 5 are colored in green, and the position W8 with log 10(p)>5 at day 13 is colored in blue (highly significant increase). Dashed horizontal lines show the hit thresholds. The sequence conservation ConSurf score is shown in orange. FIG. 3G—Residues that abolish silencing at day 5 when mutated are mapped onto the ordered region of the NMR structure of mouse KRAB A-box (PDB: 1v65).

[0029] FIGS. 4A and 4B show that homeodomain repression strength is colinear with Hox gene organization. FIG. 4A—Ranking of homeobox gene families or classes by median repression strength at Day 5. The HOXL and NKL subclasses of the ANTP class homeodomains and the PRD and LIM classes, which contain the strongest homeodomain repressors, are split into individual gene families (Holland BMC 2007) while the remaining classes are aggregated. Dot colors are the quintile of the Homeodomain expression level as measured in the HT-expression assay. FIG. 4B—Repressor strength at day 5 of the homeodomains from the Hox gene families. Arrows represent the genes found in the four human Hox loci and point in the direction of Hox gene transcription. Grey bars separate the gene families. Spearman's rho and the p-value were computed for the relationship between the gene number and repressor strength across all Hox genes. Data was filtered to remove any domains that had fewer than 10 counts in any of the Day 5 sequencing samples.

[0030] FIGS. 5A-5F show that high-throughput recruitment discovers activator domains, including a potent, acidic, and divergent KRAB domain variant in ZNF473. FIG. 5A—Schematic of the activation reporter which uses a weak minCMV promoter that can be activated by dox-mediated recruitment of activating domains, and a schematic of the activation screen. The pool of cells was treated with doxycycline for 48 hours, ON and OFF cells were magnetically separated with ProG Dynabeads and the domains were sequenced. FIG. 5B—The reproducibility of log 2(OFF:ON) ratios from independently transduced biological replicates is shown with known activator domain families (FOXO-TAD, Myb LMSTEN, TORC_C) colored. FIG. 5C—GO term enrichments of genes containing a domain with activation strength below a threshold. FIG. 5D—Activator domains (red) are more acidic than non-hits (grey). FIG. 5E—List of domain families, ranked by mean activation strength. FIG. 5F—KRAB domains were aligned and clustered by sequence, providing similar results to the classification in Helleboid 2019. The cluster of most divergent KRAB sequences is labeled variant KRABs in green. Results from screens are shown below in heatmaps. Standard KRABs function as repressors, if they are well-expressed. The variant KRABs show mixed effects as repressors, activators, and no transcriptional effect in the screens.

[0031] FIGS. 6A-6F show that a tiling library uncovers new autonomous repressor domains within large chromatin regulator proteins. FIG. 6A—Graphical depiction of library in which 80 AA tiles cover the protein sequence, with a 10 AA sliding window. FIG. 6B—The reproducibility of log 2(OFF:ON) ratios from independently transduced biological replicates is shown. FIG. 6C—Repression at Day 5 is compared with known domain architecture for the MGA protein. Two repressor domains are found outside the previously annotated regions. FIG. 6D—Flow cytometry time courses validate the individual MGA effectors as 80 AA tiles. FIG. 6E—The effectors were minimized to 10 and 30 AA subtiles by selecting the sequence shared in common among the tiles that show repressor activity in the screen. These minimized sequences were validated individually with flow cytometry time courses. FIG. 6F—Individual validation of additional 80 AA repressor hits from the tiling screen. rTetR-tile fusions were delivered to K562 reporter cells by lentivirus and cells were treated with 100 ng/ml dox for 5 days, then dox was removed. Cells were analyzed by flow cytometry and the fraction of cells OFF was measured by gating the cells by their citrine expression level.

[0032] FIGS. 7A-7D show that a recruitment assay measures gene silencing by lentiviral rTetR-domain fusions with a fluorescent reporter. FIG. 7A—Schematic of lentiviral vector. FIG. 7B—Pilot test in K562 reporter cells, showing citrine OFF:ON FACS histograms over time for ZNF10KRAB cloned onto pJT050. 1000 ng/ml dox was added on day 0 and removed on day 5. FIG. 7C—Fraction of cells ON over time FIG. 7D—The reporter system was also established in HEK293T cells. Cells were transfected with plasmid encoding rTetR-KRAB or pOri control and treated with or without 1000 ng/ml dox for 2 (top) and 4 (bottom) days before being analyzed with flow cytometry.

[0033] FIGS. 8A-8E show high-throughput measurements of domain expression by FLAG staining, sorting, and sequencing. FIG. 8A—Schematic of a high-throughput approach to measure the expression level for each domain fusion in the library. FIG. 8B—Reproducibility of domain expression measurements. FIG. 8C—Validation with Western Blot. FIG. 8D—Stability of sub-libraries—random are destabilized, tiles are similar to Pfam domains. FIG. 8E—Stability related to net charge of residue and residues which are classified as disorder promoting.

[0034] FIGS. 9A-9E show a screen of Pfam domains for repressor function. FIG. 9A—Flow cytometry of library of cells before and after magnetic separation. FIG. 9B—PANTHER protein class enrichments for stable vs transient repressors top 10, log P. FIG. 9C—Full list of domain families, ranked by repressor strength at day 5. FIG. 9D—rTetR-SUMO fusions silence the reporter. Mutation in SUMO conjugation site (GG91AA) reduce silencing speed and mutation in SUMO-interacting non-covalent binding site reduces silencing memory. FIG. 9E—Validation of Domains of Unknown Function (DUFs) with repressor activity.

[0035] FIGS. 10A-10C show a KRAB deep mutational scan. FIG. 10A—OFF:ON scores from two biological replicates of a deep mutational library of the KRAB domains from ZNF10 at Day 5, 9 and 13. FIG. 10B—FLAG-tag stain for KRAB variant expression level: non-silencing one gets degraded. B-box mutants are stable. FIG. 10C—FLAG-tag stain correlates with FLAG-tag Western Blot.

[0036] FIGS. 11A-11C show activator screen data. FIG. 11A—Pilot test, electroporating rTetR-VP64 to K562 minCMV reporter cells. After doxycycline is added, the reporter cells turn ON as measured by flow cytometry for citrine expression. FIG. 11B—Magnetic separation of pooled library during activator screen, analyzed by flow cytometry. FIG. 11C—Comparison of HT-recruit transcriptional regulation measurements, using the Pfam domain library with two different reporter promoters. Each domain is a dot and the dot's size is the expression quartile as measured in the FLAG screen.

[0037] FIGS. 12A-12D show hundreds of repressors discovered in a screen of thousands of Pfam domains. FIG. 12A—Boxplots of top repressor domain families, ranked by the maximum repressor strength at day 5 of any domain within the family. Line shows the median, whiskers extend beyond the high- and low-quartile by 1.5 times the interquartile range, and outliers are shown with diamonds. Dashed line shows the hit threshold. Boxes colored for domain families highlighted in the text. FIG. 12B—Individual validations for RYBP domain and two Domains of Unknown Function (DUF) with repressor activity, measured by flow cytometry. Untreated cell distributions are shown in light grey and doxycycline-treated cells are shown in colors, with two independently-transduced biological replicates in each condition. The vertical line shows the citrine gate used to determine the fraction of cells OFF. FIG. 12C—Validation time courses fit with the gene silencing model: exponential silencing with rate ks, followed by exponential reactivation. Doxycycline (1000 ng/ml) was added on day 0 and removed on day 5 (N=2 biological replicates). The fraction of mCherry positive cells with the citrine reporter OFF was determined by flow cytometry, as in FIG. 12B, and normalized for background silencing using the untreated, time-matched controls. FIG. 12D—Correlation of high-throughput measurements at day 5 with the silencing rate ks (R²=0.86, n=15 domains, N=2-3 biological replicates). Horizontal error bars are the standard deviation for the fitted rates, vertical error bars are the range of screen biological replicates, and dashed lines are the 95% confidence interval of the linear regression.

[0038] FIGS. 13A-13E show Hox homeodomain repression strength is colinear with Hox gene organization and associated with positive charge. FIG. 13A—Ranking of homeobox gene classes by median repression strength of their homeodomain at day 5. Horizontal line shows the hit threshold. None of the 5 homeodomains from the CERS class were well-expressed. FIG. 13B—Homeodomains from the Hox gene families. (Top) Hox gene expression pattern along the anterior-posterior axis is colored by Hox paralog number on an adapted embryo image (Hueber et al., 2010). Hox 11 and 12 are expressed both at the posterior end and along the proximal-distal axis of limbs (Wellik and Capecchi, 2003). (Middle) Repression strength after 5 days of dox. Dots are colored by the Hox cluster and the paralog number is colored as in the embryo diagram. Spearman's rho and p-value were computed for the relationship between the paralog number and repressor strength across all Hox genes. (Bottom) Colored arrows represent the genes found in the four human Hox clusters and point in the direction of Hox gene transcription from 5′ to 3′. Grey bars separate gene sequence similarity groups as previously classified (Hueber et al., 2010). FIG. 13C—Multiple sequence alignment of Hox homeodomains, with stronger repressors at the top (as ranked by OFF:ON ratio at day 5), showing the RKKR motif highlighted in red. Other basic residues within the N-terminal arm are colored in lavender. FIG. 13D—Correlation between the number of positively charged residues in the N-terminal arm upstream of Helix 1 of each Hox homeodomain and the average repression at day 5. Dot color shows paralog number. FIG. 13E—NMR structure of the HOXA 13 homeodomain retrieved from PDB ID: 2L7Z, with RKKR motif highlighted in red. The sequence from G15 to S81, using the coordinates from the multiple sequence alignment, is shown.

[0039] FIGS. 14A-14G show discovery of activator domains. FIG. 14A—Schematic of the activation reporter which uses a weak minCMV promoter that can be activated by doxycycline-mediated recruitment of activating effector domains fused to rTetR. FIG. 14B—Reproducibility of high-throughput activator measurements from two independently transduced biological replicates. The pool of cells containing the activation reporter in (FIG. 14A) were transduced with the nuclear domain library and treated with doxycycline for 48 hours; ON and OFF cells were magnetically separated, and the domains were sequenced. The ratios of sequencing reads from the OFF vs. ON cells are shown for domains that were well-expressed. Pfam-annotated activator domain families (FOXO-TAD, Myb LMSTEN, TORC_C) are colored in shades of red. A line is drawn to the strongest hit, the KRAB domain from ZNF473. The hit threshold is a dashed line drawn two standard deviations below the mean of the poorly expressed domain distribution. FIG. 14C—Rank list of domain families with at least one activator hit. Families previously annotated as activators in Pfam are in red. The dashed line represents the hit threshold, as in FIG. 14B. Only well-expressed domains are shown. FIG. 14D—Acidity of effector domains from the Pfam library, calculated as net charge per amino acid. (Left) Comparison of the nonhit, well-expressed Pfam domains (except KRAB and annotated activators) with the activator hits. The Pfam-annotated activator domain families are shown as a group as a positive control (orange). (Right) Comparison of the activator hits and non-hits from the KRAB domain family. P-values from Mann-Whitney test shown with bars between compared groups. n.s.=not significant (p>0.05). FIG. 14E—Phylogenetic tree of all well-expressed KRAB domains with the sequence-divergent variant KRAB cluster shown in green (top). High-throughput recruitment measurements for repression at Day 5 are shown in blue (middle) and measurements for activation are shown in red (bottom). Dashed horizontal lines show hit thresholds. An example repressor KRAB from ZNF10, the repressor KRAB_1 from ZFP28, and all of the activator KRAB domains are called out with larger labels. The KRAB domain start position is written in parentheses. FIG. 14F—Individual validation of variant KRAB activator domains. rTetR(SE-G72P)-domain fusions were delivered to K562 reporter cells by lentivirus and selected for with blasticidin, cells were treated with 1000 ng/ml doxycycline for 2 days, and then citrine reporter levels were measured by flow cytometry. Untreated cell distributions are shown in light grey and doxycycline-treated cells are shown in colors, with two independently-transduced biological replicates in each condition. The vertical line shows the citrine gate used to determine the fraction of cells ON and the average fraction ON for the doxycycline-treated cells is shown. FIG. 14G—Distance of ChIP peak locations of KRAB Zinc Finger proteins away from the nearest peaks of the active chromatin mark H3K27ac. KRAB proteins are classified by their status as hits (blue) or non-hits (green) in the repressor screen at day 5 (left). In addition, data is shown individually for ZNF10 which contains a repressor hit KRAB (black), ZNF473 which contains an activator hit KRAB (red), and ZFP28 which contains both an activator hit and a repressor hit KRAB (yellow) (right). Each dot shows the fraction of peaks in a 40 basepair bin. ChIP-seq and ChiP-exo data retrieved from (ENCODE Project Consortium et al., 2020; Imbeault et al., 2017; Najafabadi et al., 2015; Schmitges et al., 2016). Only solo peaks, where a single KRAB Zinc Finger binds, are included for the aggregated data (blue and green dots, left), but all peaks are included for the individual proteins because the number of solo peaks is low for each individual protein (red, black, and yellow dots, right).

[0040] FIGS. 15A-15I show compact repressor domains discovered within nuclear proteins. FIG. 15A—Schematic of 80 AA tiling library covering a curated set of 238 nuclear-localized proteins. These tiles were fused to rTetR and recruited to the reporter, using the same workflow as in FIG. 1 to measure repression strength. FIG. 15B—Tiled genes ranked by maximum repressor function at day 5 shown with a dot for each tile. Hits are tiles with a log 2(OFF:ON)≥2 standard deviations above the mean of the negative controls. Genes with a hit tile are colored in a gradient and genes without any hit tiles are colored in grey. FIG. 15C—Tiling CTCF. Diagram shows protein annotations retrieved from UniProt. Horizontal bars show the region spanned by each tile and vertical error bars show the standard error from two biological replicates of the screen. The strongest hit tile is highlighted with a vertical gradient and annotated as a repressor domain (orange). FIG. 15D—Tiling BAZ2A (also known as TIP5). FIG. 15E—Individual validations. Lentiviral rTetR(SE-G72P)-tile fusions were delivered to K562 reporter cells, cells were treated with 100 ng/ml doxycycline for 5 days (between dashed vertical lines), and then doxycycline was removed. Cells were analyzed by flow cytometry, the fraction of cells with citrine reporter OFF was determined and the data fit with the gene silencing model (N=2 biological replicates). Two KRAB repressor domains are shown as positive controls. The tiling screen data that corresponds to the validations shown on the bottom (blue curves) is shown in FIG. 22. FIG. 15F—Tiling MGA. Two repressor domains are found outside the previously annotated regions and labeled as Repressor 1 and 2 (dark red, purple). The minimized repressor regions at the overlap of hit tiles are highlighted with narrow red vertical gradients. FIG. 15G—The maximal strength repressor tiles from two peaks in MGA were individually validated with the method described in FIG. 15E (N=2 biological replicates). FIG. 15H—The MGA repressor 1 sequence was minimized by selecting the region shared in common between all hit tiles in the peak, shown between dashed vertical lines and shaded in red. The protein sequence conservation ConSurf score is shown below with an orange line and the confidence interval (the 25th and 75th percentiles of the inferred evolutionary rate distribution) is shown in grey. The asterisks mark residues that are predicted to be functional (highly conserved and exposed) by ConSurf. The repressor 2 sequence was minimized with the same approach and also overlaps a region with predicted functional residues (data not shown). FIG. 15I—The MGA effectors were minimized to 10 and 30 AA sub-tiles, as shown in FIG. 15H, cloned as lentiviral rTetR(SE-G72P)-tile fusions, and were delivered to K562 reporter cells. After selection, cells were treated with 100 or 1000 ng/ml doxycycline for 5 days and the percentages of cells with the Citrine reporter silenced were measured by flow cytometry (N=2 biological replicates).

[0041] FIGS. 16A-16C show validation of lentiviral recruitment assay and dual reporter for gene silencing. FIG. 16A—Schematic of lentiviral recruitment vector with Golden Gate cloning site for creating fusions of effector domains to the dox-inducible DNA-binding domain rTetR. The constitutive pEF promoter drives expression of the rTetR-effector fusion and mCherry-BSD (Blasticidin S deaminase resistance gene), separated by a T2A self-cleaving peptide. FIG. 16B—(Top) Schematic of rTetR-KRAB fusion recruitment to the dual reporter gene. The reporter is integrated in the AAVS1 locus by TALEN-mediated homology-directed repair and the PuroR resistance gene is driven by the endogenous AAVSJ promoter. The dual reporter consists of a synthetic surface marker (Igx-hIgG1-Fc-PDGFRβ) and a citrine fluorescent protein. (Bottom) Pilot test in K562 reporter cells. Reporter cells were generated by TALEN-mediated homology-directed repair to integrate the reporter into the AA V1S locus and then selected with puromycin. Cells were then spinfected with lentivirus to deliver rTetR-KRAB, and then either left untreated or treated with 1000 ng/ml doxycycline to induce rTetR binding to DNA at the TetO sites. Untreated cell distributions are shown in light grey and doxycycline-treated cells are shown in black or orange, with two independently-transduced biological replicates in each condition. The lentivirus-treated cells are gated on mCherry as the delivery marker. The KRAB domain from human ZNF10 was used. FIG. 16C—Demonstration of magnetic separation of OFF from ON cells using ProG Dynabeads that bind to the synthetic surface marker. Ten million cells were subjected to magnetic separation using 30 μl of beads, and the citrine reporter expression was measured before and after by flow cytometry. Illustration of mixed ON and OFF cells being subjected to magnetic separation is shown on the right.

[0042] FIGS. 17A-17F show high-throughput measurements of domain expression by FLAG staining, sorting, and sequencing. FIG. 17A—(Top) Schematic of high-throughput strategy for measuring the expression level of each domain in the library. Domains under 80AA long are extended on both sides, using their native protein sequence, to reach 80AA so all synthesized library elements are the same length. (Middle) The library is cloned into a FLAG-tagged construct and delivered to K562 cells by lentivirus at low multiplicity of infection, such that the majority of cells express a single library member. The mCherry-BSD fusion protein enables blasticidin selection and a fluorescent marker for delivery and selection efficiency, without the use of a second 2A component. (Bottom) Expression is measured by staining the cells with anti-FLAG, sorting high and low expression populations, sequencing the domains, and computing the log 2(FLAGhigh:FLAGlow) ratio. FIG. 17B—Distribution of FLAG staining levels measured by flow cytometry before and after sorting into two bins (N=2 biological replicates of the cell library shown with overlapping shaded areas). FIG. 17C—Reproducibility of biological replicates from the domain expression screen (r²=0.82). Well-expressed domains, above the threshold (dashed line one standard deviation above the median of the random controls), were selected for further analysis in the transcriptional regulation screens. FIG. 17D—Validation of expression level for a panel of KRAB domains. Individual rTetR-3×FLAG-KRAB constructs were delivered to K562 cells by lentivirus. Cells were selected with blasticidin and confirmed to be >80% mCherry positive by flow cytometry. Expression level was measured by Western blot with anti-FLAG antibody. Anti-histone H3 was used as a loading control for normalization. Levels were quantified using ImageJ. FIG. 17E—Comparison of high-throughput measurements of expression with Western blots protein levels. These 6 KRAB domains were cloned individually using the exact 80 AA sequence from the Pfam domain library. FIG. 17F—Distribution of expression levels for different categories of library members. Random controls are poorly expressed compared to tiles across the DMD protein or Pfam domains (p<1e-5, Mann Whitney test). Dashed line shows the threshold for expression level, as in FIG. 17C.

[0043] FIGS. 18A-18K show identification of domains with repressor function. FIG. 18A—Flow cytometry shows citrine reporter level distributions in the pool of cells expressing the Pfam domain library, before and after magnetic separation using ProG DynaBeads that bind to the synthetic surface marker. Overlapping histograms are shown for two biological replicates. The average percentage of cells OFF is shown to the left of the vertical line showing the citrine level gate. 1000 ng/ml doxycycline was added on Day 0 and removed on Day 5. FIG. 18B—PANTHER protein class enrichments for nuclear proteins that contain repressor domains with stronger or weaker memory, when compared to the background set of all nuclear proteins with domains included in the library. FIG. 18C—rTetR-SUMO validation time courses fit with gene silencing model. The 80 AA sequence centered around the Rad60-SLD domain of SUMO3 and the trimmed domain were individually cloned into lentivirus and delivered to the reporter cells. 1000 ng/ml doxycycline was added on day 0 and removed on day 5 (N=2 biological replicates). The fraction of mCherry-positive cells with the citrine reporter OFF was determined by flow cytometry and normalized for background silencing using the untreated, time-matched controls. FIG. 18D—HUSH complex member MPP8 Chromo domain validation with the full 80 AA sequence used in the screen and sequences trimmed to match the Pfam and UniProt annotations. FIG. 18E—CBX1 Chromoshadow domain validation with 52 AA sequence trimmed to match the Pfam annotation. FIG. 18F—Polycomb 1 component SCMH1 SAM1 domain (also known as SPM) validation with 65 AA sequence trimmed to match the Pfam annotation. FIG. 18G—HERC2 Cyt-b5 domain validation with the full 80 AA sequence used in the screen and a 72 AA sequence trimmed to match the Pfam annotation. FIG. 18H—BIN1 SH3_9 domain validation. FIG. 18I—Polycomb 1 component PCGF2 zf-C3HC4_2 domain validation with 39 AA sequence trimmed to match the Pfam annotation. FIG. 18J—TOX HMG box domain validation with the full 80 AA sequence used in the screen and a 68 AA sequence trimmed to match the Pfam annotation. FIG. 18K—Validation of a random 80 AA sequence that functions as a repressor.

[0044] FIGS. 19A-19D show rTetR(SE-G72P) mitigates leaky KRAB silencing in human cells. FIG. 19A—Silencing by rTetR-KRAB fusions, showing leaky silencing without doxycycline treatment for a subset of KRAB domains (high gray bars). Constructs were delivered to reporter cells by lentivirus at day 0, cells were selected with blasticidin between days 3 and 11, cells were split into a doxycycline-treated or untreated condition at day 11, and reporter levels were measured by flow cytometry at day 16. Results are shown after gating for the mCherry positive cells. The KRAB domains were selected from three categories based on their measurements in the screen, labeled on the right. The bar shows the average and the error bar shows the standard deviation (N=3 independently transduced biological replicates). FIG. 19B—Leakiness can be mitigated by using rTetR(SE-G72P) or introducing 3×FLAG between rTetR and the KRAB domain from ZNF823. Constructs were delivered to reporter cells by lentivirus at day 0, cells were split into a doxycycline-treated or untreated condition at day 4, and reporter levels were measured by flow cytometry at day 7. Results are shown after gating for the mCherry positive cells. A non-leaky KRAB domain from ZNF140 was used as a control. The bar shows the average and the error bar shows the standard deviation (N=2 independently transduced biological replicates). FIG. 19C—The K562 reporter cell lines with stable lentiviral expression of either a leaky KRAB domain from ZNF823 or a non-leaky repressor KRAB domain from ZNF140 cloned as fusions with either rTetR or rTetR(SE-G72P) were treated with varied doses of doxycycline. Reporter levels were measured by flow cytometry four days later, and the percentage of mCherry positive cells with the citrine reporter OFF is shown (N=2 independently transduced biological replicates). The dose response was fit by least squares with a non-linear variable slope sigmoidal curve using PRISM statistical analysis software. FIG. 19D—Silencing and memory dynamics for all individual validations of KRAB domains, fit with the gene silencing model. rTetR(SE-G72P)-KRAB fusions were delivered to K562 reporter cells by lentivirus, selected with blasticidin, and then 10 ng/ml doxycycline was added on day 0 and removed on day 5 (N=2 biological replicates). The fraction of mCherry positive cells with the citrine reporter OFF was determined by flow cytometry and normalized for background silencing using the untreated, time-matched controls. 10 ng/ml dox was used to work in a dynamic range where it is easier to measure differences in silencing and memory capabilities between fast KRAB silencing domains. With 1000 ng/ml doxycycline, all of the repressor hit KRAB domains (greens and oranges) fully silence the reporter within 5 days with indistinguishable dynamics (data not shown). Notably, the KRABs that were leaky on rTetR (oranges), do not show significantly different memory dynamics from the KRABs that were not leaky (greens) when fused to the rTetR(SE-G72P). Importantly, none of the rTetR(SE-G72P)-KRAB fusions showed significant leaky silencing in the untreated condition.

[0045] FIGS. 20A-20H show deep mutational scan of ZNF10 KRAB used in CRISPRi. FIG. 20A—Flow cytometry shows citrine reporter levels in the cells with the pooled KRAB library, before and after magnetic separation using ProG DynaBeads that bind to the synthetic surface marker. Overlapping histograms are shown for two biological replicates. The average percentage of cells OFF is shown to the left of the vertical line showing the citrine level gate. FIG. 20B—OFF:ON enrichments from two biological replicates of the deep mutational library of the ZNF10 KRAB domain at days 5, 9 and 13. Cells were treated with 1000 ng/ml doxycycline for the first 5 days. Grey diagonal lines show where the average log 2(OFF:ON) is the median of the WT domains (black dots). The black diagonal lines show the fit linear model. FIG. 20C—Alignment of human ZNF10 KRAB with mouse KRAB used in the NMR structure (PDB:1v65) and KRAB-O used in the recombinant protein binding assays (Peng et al., 2009). The ordered region is used in FIG. 3 and the aligned region containing all 12 necessary residues is used in (FIG. 20D). The residues necessary for silencing at day 5 are colored in red in the ZNF10 and PDB:1v65 sequences. The residues necessary for binding recombinant KAP1 are colored in red and the residues unnecessary for binding KAP1 are colored in grey in the KRAB-O sequence, summarizing previously published results (Peng et al., 2009). FIG. 20D—Ensemble of 20 states of the KRAB NMR structure (PDB:1v65). The residues necessary for silencing at day 5 are colored in red. FIG. 20E—Silencing and memory dynamics for all individual validations of KRAB ZNF10 mutants, fit with the gene silencing model. (Top) rTetR-KRAB fusions were delivered to K562 reporter cells by lentivirus, selected with blasticidin, and then 1000 ng/ml doxycycline was added on day 0 and removed on day 5 (N=2 biological replicates. (Bottom) rTetR(SE-G72P)-KRAB fusions were delivered to K562 reporter cells by lentivirus, selected with blasticidin, and then 10 ng/ml doxycycline was added on day 0 and removed on day 5 (N=2 biological replicates). The column labels describe the variant location within the KRAB domain and impact on effector function. The fraction of mCherry positive cells with the citrine reporter OFF was determined by flow cytometry and normalized for background silencing using the untreated, time-matched controls. All of the rTetR(SE-G72P)-KRAB fusions were also measured over 5 days of treatment with 1000 ng/ml doxycycline and the results were indistinguishable from those with rTetR, with all KRAB variants completely silencing the reporter except the EEW25AAA variant that does not silence (data not shown). FIG. 20F—Correlation of rTetR-KRAB fusion expression level and day 13 silencing score, from the Pfam domain library. Only KRAB domains that were shown to interact with co-repressor KAP1 by IP/MS (Helleboid et al., 2019) are included. FIG. 20G—Correlations of amino acid frequency with domain expression level, across the library of Pfam domains and controls (Pearson's r value is shown). FIG. 20H—Western blot for FLAG-tagged rTetR-KRAB fusions after lentiviral delivery to K562. Cells were selected for delivery with blasticidin and were confirmed to be >80% mCherry positive by flow cytometry. Expression level relative to the H3 loading control was quantified using ImageJ.

[0046] FIGS. 21A-21C show HT-recruit to a minimal promoter discovers activator domains. FIG. 21A—Flow cytometry for pooled library of Pfam domains in activation reporter cells, before and after magnetic separation. The percentage of cells ON is shown to the right of the citrine level gate, drawn with a vertical line. 1-2 biological replicates are shown with overlapping shaded areas. FIG. 21B—GO term enrichment of genes containing a hit activation domain, compared to the background set of all proteins containing a well-expressed domain in the library after counts filtering. Raw p-values are shown, and all shown terms are below a 10% false discovery rate. FIG. 21C—Individual validations of activator domains. rTetR(SE-G72P)-domain fusions were delivered to K562 reporter cells by lentivirus and selected with blasticidin. Cells were treated with 1000 ng/ml doxycycline for 2 days, and then citrine reporter levels were measured by flow cytometry. Untreated cell distributions are shown in light grey and doxycycline-treated cells are shown in colors, with two independently-transduced biological replicates in each condition. The vertical line shows the citrine gate used to determine the fraction of cells ON, and the average fraction ON for the doxycycline-treated cells is shown. VP64 is a positive control. Each domain was tested as both the extended 80 AA sequence from the library or the trimmed Pfam-annotated domain sequence, with the exceptions of Med9 and DUF3446 which had minimal extensions because the Pfam annotated regions are 75 and 69 AA, respectively. The corresponding results for the 80 AA library sequence for the KRAB domains are shown in FIG. 14.

[0047] FIGS. 22A-22H show identification of compact repressor domains in nuclear proteins with tiling screen. FIG. 22A—Flow cytometry shows citrine reporter level distributions in the pool of cells expressing the tiling library, before and after magnetic separation using ProG DynaBeads that bind to the synthetic surface marker. Overlapping histograms are shown for two biological replicates. The average percentage of cells OFF is shown to the left of the vertical line showing the citrine level gate. 1000 ng/ml doxycycline was added on Day 0 and removed on Day 5. FIG. 22B—High-throughput recruitment measurements from two biological replicates of a nuclear protein tiling library at Day 5 of doxycycline treatment and Day 13, 8 days after doxycycline removal. The hit calling threshold is 2 standard deviations above the mean of the random and DMD tiling controls. FIG. 22C—Tiling results for KRAB Zinc finger proteins ZNF57 and ZNF461. Each bar is an 80 AA tile and the vertical error bars are the range from 2 biological replicates. Protein annotations are sourced from UniProt. FIG. 22D—Tiling RYBP. Diagram shows protein annotations, retrieved using the UniProt ID written at top. Vertical error bars show the standard error from two biological replicates. FIG. 22E—Tiling REST. FIG. 22F—Tiling CBX7. FIG. 22G—Tiling DNMT3B. FIG. 22H (Top) Tiling DMD. (Bottom) Dynamics of silencing and memory after recruitment of DMD hit tiles. Cells were treated with 1000 ng/ml doxycycline for the first 5 days and citrine reporter levels were measured by flow cytometry. The percentage of cells OFF was normalized to account for background silencing and the data (dots) were fit with a gene silencing model (curves) (N=2 biological replicates).

### DETAILED DESCRIPTION

[0048] Systems and methods to generate a catalog of compact transcriptional effector domains is provided. Further, in some embodiments, this catalog of domains is fused onto DNA binding domains to engineer synthetic transcription factors. These find use to perform targeted and tunable regulation of gene expression in eukaryotic (or other) cells. This technology leverages a high-throughput platform to screen and characterize tens of thousands of synthetic transcription factors in cells. These synthetic transcription factors are fusions between a DNA binding domain and a transcriptional effector domain. The system has been used to generate hundreds of short effector domains (e.g., 80 amino acids) and a high-throughput process for shortening them further to the minimally sufficient sequences (e.g., 10 amino acids), which is an advantage for delivery (e.g., packaging in viral vectors). The targeting of these fusions generates local regulation of mRNA transcription, either negatively or positively depending on the effector domain. Some of these synthetic transcription factors mediate long-term epigenetic regulation that persists after the factor itself has been released from the target.

[0049] Previously, a limited number of transcriptional effector domains were available for the engineering of synthetic transcription factors. To address this limitation, provided herein is a high-throughput approach to screening and quantifying the function of transcriptional effectors domains. This approach enabled the discovery of hundreds of effector domains that can upregulate or downregulate transcription in a targeted manner when fused onto a DNA binding domain. This process also finds use to identify mutants of effector domains with enhanced activity. These effector domains find use to engineer synthetic transcription factors for applications in gene and cell therapy, synthetic biology, and functional genomics.

[0050] Exemplary applications include, but are not limited to.

[0051] Targeted repression/activation of endogenous genes with fusions of programmable DNA binding domains (e.g., dCas9, dCas12a, zinc finger, TALE) to transcriptional effector domains.

[0052] Gene and cell therapy (e.g., to silence a pathogenic transcript in a patient) or in research.

[0053] Synthetic transcription factors find use to perturb the expression of multiple genes simultaneously (e.g., to perform high-throughput genetic interaction mapping with CRISPRi/a screens using multiple guide RNAs).

[0054] Use in synthetic transcription factors in genetic circuits, e.g., inducible gene expression or more complex circuits. These circuits find use in gene therapy (e.g., AAV delivery of antibodies) and cell therapy (e.g., ex vivo engineering of CAR-T cells) to achieve therapeutic gene expression outputs in response to environmental and small molecule inputs.

[0055] The new transcriptional effector domains provided herein have several advantages for applications that rely on synthetic transcription factors. Short domains were identified (e.g., 80 amino acids or less) and a high-throughput process was generated for shortening them further to the minimally sufficient sequence, which is an advantage for delivery (e.g., packaging in viral vectors). In some cases, potent effector domains were identified that were as short as 10 amino acids. In some embodiments, the domains are extracted from human proteins, which provides the advantage of reducing immunogenicity in comparison to viral effector domains. Most of the domains generated have not been reported as transcriptional effectors previously. In addition, a high-throughput process is provided for testing mutations in these domains in order to identify enhanced variants. The high-throughput approach is more readily aided by the development of an artificial cell surface marker that provides more efficient, inexpensive, and rapid screening of these libraries using magnetic separation. This is an advantage over the more conventional approach of sorting libraries based on fluorescent reporter gene expression.

[0056] The collection of domains identified is large and diverse, and the platform readily enables new combinations of domains to be tested as fusions in high-throughput to create synthetic transcription factors with new properties (e.g., compositions of two repressor domains to achieve a combination of fast silencing and permanent silencing).

[0057] Hundreds of previously uncharacterized or unknown effector domains that can silence or active transcription and can be fused onto DNA binding domains. For example, a high-throughput approach for screening single domains and pairs of domains using lentiviral screens in human cells is provided. The high-throughput approach is more readily enabled by the development of an artificial cell surface marker that provides more efficient, inexpensive, and rapid screening of these libraries using a magnetic separation.

### 1. Definitions

[0058] The terms “comprise(s),” “include(s),” “having,” “has,” “can,” “contain(s),” and variants thereof, as used herein, are intended to be open-ended transitional phrases, terms, or words that do not preclude the possibility of additional acts or structures. The singular forms “a,” “and” and “the” include plural references unless the context clearly dictates otherwise. The present disclosure also contemplates other embodiments “comprising,” “consisting of” and “consisting essentially of,” the embodiments or elements presented herein, whether explicitly set forth or not.

[0059] For the recitation of numeric ranges herein, each intervening number there between with the same degree of precision is explicitly contemplated. For example, for the range of 6-9, the numbers 7 and 8 are contemplated in addition to 6 and 9, and for the range 6.0-7.0, the number 6.0, 6.1, 6.2, 6.3, 6.4, 6.5, 6.6, 6.7, 6.8, 6.9, and 7.0 are explicitly contemplated.

[0060] Unless otherwise defined herein, scientific, and technical terms used in connection with the present disclosure shall have the meanings that are commonly understood by those of ordinary skill in the art. For example, any nomenclature used in connection with, and techniques of, cell and tissue culture, molecular biology, immunology, genetics and protein and nucleic acid chemistry and hybridization described herein are those that are well known and commonly used in the art. The meaning and scope of the terms should be clear; in the event, however of any latent ambiguity, definitions provided herein take precedent over any dictionary or extrinsic definition. Further, unless otherwise required by context, singular terms shall include pluralities and plural terms shall include the singular.

[0061] The term “antibody,” as used herein, refers to a protein that is endogenously used by the immune system to identify and neutralize foreign objects, such as bacteria and viruses. Typically, an antibody is a protein that comprises at least one complementarity determining region (CDR). The CDRs form the “hypervariable region” of an antibody, which is responsible for antigen binding (discussed further below). A whole antibody typically consists of four polypeptides: two identical copies of a heavy (H) chain polypeptide and two identical copies of a light (L) chain polypeptide. Each of the heavy chains contains one N-terminal variable (V_{H}) region and three C-terminal constant (C_{H1}, C_{H2}, and C_{H3}) regions, and each light chain contains one N-terminal variable (V_{L}) region and one C-terminal constant (C_{L}) region. The light chains of antibodies can be assigned to one of two distinct types, either kappa (κ) or lambda (λ), based upon the amino acid sequences of their constant domains. In a typical antibody, each light chain is linked to a heavy chain by disulfide bonds, and the two heavy chains are linked to each other by disulfide bonds. The light chain variable region is aligned with the variable region of the heavy chain, and the light chain constant region is aligned with the first constant region of the heavy chain. The remaining constant regions of the heavy chains are aligned with each other. The variable regions of each pair of light and heavy chains form the antigen binding site of an antibody. The V_{H} and V_{L} regions have the same general structure, with each region comprising four framework (FW or FR) regions. The term “framework region,” as used herein, refers to the relatively conserved amino acid sequences within the variable region which are located between the CDRs. There are four framework regions in each variable domain, which are designated FR1, FR2, FR3, and FR4. The framework regions form the R sheets that provide the structural framework of the variable region (see, e.g., C. A. Janeway et al. (eds.), Immunobiology, 5th Ed., Garland Publishing, New York, N.Y. (2001)). The framework regions are connected by three CDRs. As discussed above, the three CDRs, known as CDR1, CDR2, and CDR3, form the “hypervariable region” of an antibody, which is responsible for antigen binding. The CDRs form loops connecting, and in some cases comprising part of, the beta-sheet structure formed by the framework regions. While the constant regions of the light and heavy chains are not directly involved in binding of the antibody to an antigen, the constant regions can influence the orientation of the variable regions. The constant regions also exhibit various effector functions, such as participation in antibody-dependent complement-mediated lysis or antibody-dependent cellular toxicity via interactions with effector molecules and cells.

[0062] The terms “fragment of an antibody,” “antibody fragment,” and “antigen-binding fragment” of an antibody are used interchangeably herein to refer to one or more fragments of an antibody that retain the ability to specifically bind to an antigen (see, generally, Holliger et al., Nat. Biotech., 23(9): 1126-1129 (2005)). Any antigen-binding fragment of the antibody described herein is within the scope of the invention. The antibody fragment desirably comprises, for example, one or more CDRs, the variable region (or portions thereof), the constant region (or portions thereof), or combinations thereof. Examples of antibody fragments include, but are not limited to, (i) a Fab fragment, which is a monovalent fragment consisting of the V_{L}, V_{H}, C_{L}, and C_{H1} domains, (ii) a F(ab′)₂ fragment, which is a bivalent fragment comprising two Fab fragments linked by a disulfide bridge at the hinge region, (iii) a Fv fragment consisting of the V_{L} and V_{H} domains of a single arm of an antibody, (iv) a Fab′ fragment, which results from breaking the disulfide bridge of an F(ab′)₂ fragment using mild reducing conditions, (v) a disulfide-stabilized Fv fragment (dsFv), and (vi) a domain antibody (dAb), which is an antibody single variable region domain (V_{H} or V_{L}) polypeptide that specifically binds antigen.

[0063] As used herein, a “nucleic acid” or a “nucleic acid sequence” refers to a polymer or oligomer of pyrimidine and/or purine bases, preferably cytosine, thymine, and uracil, and adenine and guanine, respectively (See Albert L. Lehninger, Principles of Biochemistry, at 793-800 (Worth Pub. 1982)). The present technology contemplates any deoxyribonucleotide, ribonucleotide, or peptide nucleic acid component, and any chemical variants thereof, such as methylated, hydroxymethylated, or glycosylated forms of these bases, and the like. The polymers or oligomers may be heterogenous or homogenous in composition and may be isolated from naturally occurring sources or may be artificially or synthetically produced. In addition, the nucleic acids may be DNA or RNA, or a mixture thereof, and may exist permanently or transitionally in single-stranded or double-stranded form, including homoduplex, heteroduplex, and hybrid states. In some embodiments, a nucleic acid or nucleic acid sequence comprises other kinds of nucleic acid structures such as, for instance, a DNA/RNA helix, peptide nucleic acid (PNA), morpholino nucleic acid (see, e.g., Braasch and Corey, Biochemistry, 41(14): 4503-4510 (2002)) and U.S. Pat. No. 5,034,506), locked nucleic acid (LNA; see Wahlestedt et al., Proc. Natl. Acad. Sci. U.S.A., 97: 5633-5638 (2000)), cyclohexenyl nucleic acids (see Wang, J. Am. Chem. Soc., 122: 8595-8602 (2000)), and/or a ribozyme. Hence, the term “nucleic acid” or “nucleic acid sequence” may also encompass a chain comprising non-natural nucleotides, modified nucleotides, and/or non-nucleotide building blocks that can exhibit the same function as natural nucleotides (e.g., “nucleotide analogs”); further, the term “nucleic acid sequence” as used herein refers to an oligonucleotide, nucleotide or polynucleotide, and fragments or portions thereof, and to DNA or RNA of genomic or synthetic origin, which may be single or double-stranded, and represent the sense or antisense strand. The terms “nucleic acid,” “polynucleotide,” “nucleotide sequence,” and “oligonucleotide” are used interchangeably. They refer to a polymeric form of nucleotides of any length, either deoxyribonucleotides or ribonucleotides, or analogs thereof.

[0064] A “peptide” or “polypeptide” is a linked sequence of two or more amino acids linked by peptide bonds. The peptide or polypeptide can be natural, synthetic, or a modification or combination of natural and synthetic. Polypeptides include proteins such as binding proteins, receptors, and antibodies. The proteins may be modified by the addition of sugars, lipids or other moieties not included in the amino acid chain. The terms “polypeptide” and “protein,” are used interchangeably herein.

[0065] As used herein, the term “percent sequence identity” refers to the percentage of nucleotides or nucleotide analogs in a nucleic acid sequence, or amino acids in an amino acid sequence, that is identical with the corresponding nucleotides or amino acids in a reference sequence after aligning the two sequences and introducing gaps, if necessary, to achieve the maximum percent identity. Hence, in case a nucleic acid according to the technology is longer than a reference sequence, additional nucleotides in the nucleic acid, that do not align with the reference sequence, are not taken into account for determining sequence identity. A number of mathematical algorithms for obtaining the optimal alignment and calculating identity between two or more sequences are known and incorporated into a number of available software programs. Examples of such programs include CLUSTAL-W, T-Coffee, and ALIGN (for alignment of nucleic acid and amino acid sequences), BLAST programs (e.g., BLAST 2.1, BL2SEQ, and later versions thereof) and FASTA programs (e.g., FASTA3×, FAS™, and SSEARCH) (for sequence alignment and sequence similarity searches). Sequence alignment algorithms also are disclosed in, for example, Altschul et al., J. Molecular Biol., 215(3): 403-410 (1990), Beigert et al., Proc. Natl. Acad. Sci. USA, 106(10): 3770-3775 (2009), Durbin et al., eds., Biological Sequence Analysis: Probabilistic Models of Proteins and Nucleic Acids, Cambridge University Press, Cambridge, UK (2009), Soding, Bioinformatics, 21(7): 951-960 (2005), Altschul et al., Nucleic Acids Res., 25(17): 3389-3402 (1997), and Gusfield, Algorithms on Strings, Trees and Sequences, Cambridge University Press, Cambridge UK (1997)).

[0066] A “vector” or “expression vector” is a replicon, such as plasmid, phage, virus, or cosmid, to which another DNA segment, e.g., an “insert,” may be attached or incorporated so as to bring about the replication of the attached segment in a cell.

[0067] The term “wild-type” refers to a gene or a gene product that has the characteristics of that gene or gene product when isolated from a naturally occurring source. A wild-type gene is that which is most frequently observed in a population and is thus arbitrarily designated the “normal” or “wild-type” form of the gene. In contrast, the term “modified,” “mutant,” or “polymorphic” refers to a gene or gene product that displays modifications in sequence and or functional properties (e.g., altered characteristics) when compared to the wild-type gene or gene product. It is noted that naturally occurring mutants can be isolated; these are identified by the fact that they have altered characteristics when compared to the wild-type gene or gene product.

### 2. Method for Identifying Transcriptional Modifying Domains

[0068] Disclosed herein are methods for identifying transcriptional effector (e.g., activator and repressor) domains. In some embodiments, the methods comprise: preparing a domain library comprising a plurality of nucleic acid sequences each configured to express a fusion protein comprising a protein domain from nuclear-localized proteins linked to an inducible DNA binding domain; transforming reporter cells with the domain library, wherein the reporter cells comprises a two-part reporter gene comprising a surface marker and a fluorescent protein under the control of a promoter, wherein the two-part reporter gene is capable of being modulated by a putative transcriptional effector domain following treatment with an agent configured to induce the inducible DNA binding domain; treating the reporter cells with the agent for a length of time necessary for protein and mRNA levels to be altered in the cell (e.g., increased due to production or decreased due to degradation); sequencing the protein domains from the separated reporter cells; calculating for each protein domain sequence a ratio of sequencing counts from reporter cells not having the surface marker, the fluorescent protein, or a combination thereof to sequencing counts from reporter cells having the surface marker, the fluorescent protein, or a combination thereof; and identifying protein domains as transcriptional repressors or activators.

[0069] The methods comprise preparing a domain library comprising a plurality of nucleic acid sequences each configured to express a fusion protein comprising a protein domain from nuclear-localized proteins linked to an inducible DNA binding domain. The protein domain may be less than or equal to 80 amino acids. In some embodiments, the protein domain may be about 75 amino acids, about 70 amino acids, about 65 amino acids, about 60 amino acids, about 55 amino acids, about 50 amino acids, about 45 amino acids, about 40 amino acids, about 35 amino acids, about 30 amino acids, about 25 amino acids, about 20 amino acids, about 15 amino acids, about 10 amino acids, or about 5 amino acids.

[0070] The protein domain may be derived from any known protein. In some embodiments, the protein domain is from a nuclear-localized protein. A nuclear-localized protein includes those proteins which are or can localize to the nucleus fully or partially during the life-cycle of the protein. In some embodiments, the protein domain comprises amino acid sequences of the wild-type protein domain from nuclear-localized proteins. In some embodiments, the protein domain comprises mutated amino acid sequences of protein domains from nuclear-localized proteins.

[0071] The inducible DNA binding domain may use any system for induction of DNA binding, including, but not limited to, tetracycline Tet,/DOX inducible systems, light inducible systems, Abscisic acid (ABA) inducible systems, cumate systems, 40HT/estrogen inducible systems, ecdysone-based inducible systems, and FKBP12/FRAP (FKBP12-rapamycin complex) inducible systems.

[0072] In some embodiments, the inducible DNA binding domain comprises a tag. The tag may include any tag known in the art, including tags removable by chemical or enzymatic means. Suitable tags for use in the present method include chitin binding protein (CBP), maltose binding protein (MBP), Strep-tag, glutathione-S-transferase (GST), a polyhistidine (PolyHis) tag, an ALFA-tag, a V5-tag, a Myc-tag, a hemagglutinin(HA)-tag, a Spot-tag, a T7-tag, an NE-tag, a Calmodulin-tag, a polyglutamate tag, a polyarginine tag, a FLAG tag, and the like.

[0073] The methods comprise transforming reporter cells with the domain library, wherein the reporter cell comprises a two-part reporter gene comprising a surface marker and a fluorescent protein under the control of a promoter, wherein the two-part reporter gene is capable of being modulated by a putative transcriptional effector domain following treatment with an agent configured to induce the inducible DNA binding domain.

[0074] The promoter may confer a high rate of transcription (a strong promoter) or confer a low rate of transcription (weak promoter). Many promoter libraries have been established experimentally and choice of promoter and promoter strength is dependent on cell type. In some embodiments, when identifying transcriptional activator domains, a weak promoter may be used. In some embodiments, when identifying transcriptional repressor domains, a strong promoter may be used.

[0075] Cell surface markers include proteins and carbohydrates which are attached to the cellular membrane. Cell surface markers are generally known in the art for a variety of cell types and can be expressed in a reporter cell of choice based on known molecular biology methods. The surface marker may be a synthetic surface marker comprising marker polypeptide attached to a transmembrane domain. For example, the marker polypeptide may include an antibody or a fragment thereof (e.g., Fc region) attached to a transmembrane domain. In some embodiments, the marker polypeptide is human IgG1 Fc region and the synthetic surface marker comprises human IgG1 Fc region attached to a transmembrane domain.

[0076] Fluorescent proteins are well known in the art and include proteins adapted to fluoresce in various cellular compartments and as a result of varying wavelengths of incoming light. Examples of fluorescent proteins include phycobiliproteins, cyan fluorescent protein (CFP), green fluorescent protein (GFP), yellow fluorescent protein (YFP), enhanced orange fluorescent protein (OFP), enhanced green fluorescent protein (eGFP), modified green fluorescent protein (emGFP), enhanced yellow fluorescent protein (eYFP) and/or monomeric red fluorescent protein (mRFP) and derivatives and variants thereof.

[0077] The methods comprise separating reporter cells based on presence or absence of the surface marker, the fluorescent protein, or a combination thereof. A number of cell separation techniques are known in the art are suitable for use with the methods disclosed herein, including, for example, immunomagnetic cell separation, fluorescent-activated cell sorting (FACS), and microfluidic cell sorting. In some embodiments, cell separation comprises immunomagnetic cell separation.

[0078] In some embodiments, the method further comprises stopping treatment of the reporter cells with the agent and repeating the separating, sequencing, calculating, and identifying steps one or more times. In some embodiments, the steps are repeated at least 48 hours after stopping treatment of the reported cells with the agent.

[0079] In some embodiments, the method further comprises measuring expression level of protein domains. The expression level of the protein domains can be determined using any methods known in the art, including immunoblotting and immunoassays for the protein itself or any tags or labels thereof. In some embodiments, the expression level is determined by measuring a relative presence or absence of the tag on the DNA binding domain.

[0080] In some embodiments, the methods identify a transcriptional repressor domain. In some embodiments, the methods comprise, a) preparing a domain library comprising a plurality of nucleic acid sequences each configured to express a fusion protein comprising a protein domain linked to an inducible DNA binding domain; b) transforming reporter cells with the domain library, wherein a reporter cell comprises a two-part reporter gene comprising a surface marker and a fluorescent protein under the control of a strong promoter, wherein the two-part reporter gene is capable of being silenced by a putative transcriptional repressor domain following treatment with an agent configured to induce the inducible DNA binding domain; c) treating the reporter cells with the agent for a length of time necessary for protein and mRNA degradation in the cell; d) separating reporter cells based on presence or absence of the surface marker, the fluorescent protein, or a combination thereof; e) sequencing the protein domains from the separated reporter cells; f) calculating for each protein domain sequence a ratio of sequencing counts from reporter cells not having the surface marker, the fluorescent protein, or a combination thereof to sequencing counts from reporter cells having the surface marker, the fluorescent protein, or a combination thereof; and g) identifying protein domains as transcriptional repressor.

[0081] In some embodiments, the reporter cells are treated with the agent for at least 3 days. For, example the reporter cells may be treated with the agent for at least 3 days, at least 4 days, at least 5 days, at least 6 days, at least 7 days, at least 8 days, at least 9 days, at least 10 days, at least 14 days, or more. In some embodiments, the reporter cells at treated with the agent for 3-12 days, 3-10 days, 3-7 days, or 3-5 days.

[0082] The protein domain is identified as a transcriptional repressor when log 2 of the ratio of sequencing counts from reporter cells not having the surface marker, the fluorescent protein, or a combination thereof to sequencing counts from reporter cells having the surface marker, the fluorescent protein, or a combination thereof is at least two standard deviations from (e.g., greater than) the mean of a negative control (See FIG. 1C, for example).

[0083] In some embodiments, the methods identify a transcriptional activator domain. In some embodiments, the methods comprise, a) preparing a domain library comprising a plurality of nucleic acid sequences each configured to express a fusion protein comprising a protein domain linked to an inducible DNA binding domain; b) transforming reporter cells with the domain library, wherein the reporter cells comprises a two-part reporter gene comprising a surface marker and a fluorescent protein under the control of a weak promoter, wherein the two-part reporter gene is capable of being activated by a putative transcriptional activator domain following treatment with an agent configured to induce the inducible DNA binding domain; c) treating the reporter cells with the agent for a length of time necessary for protein and mRNA production in the cell; d) separating reporter cells based on presence or absence of the surface marker, the fluorescent protein, or a combination thereof; e) sequencing the protein domains from the separated reporter cells; f) calculating for each protein domain sequence a ratio of sequencing counts from reporter cells not having the surface marker, the fluorescent protein, or a combination thereof to sequencing counts from reporter cells having the surface marker, the fluorescent protein, or a combination thereof; and g) identifying protein domains as transcriptional repressor.

[0084] In some embodiments, the reporter cells are treated with the agent for at least 24 hours. For, example the reporter cells may be treated with the agent for at least 24 hours (1 day), at least 36 hours, at least 48 hours (2 days), at least 60 hours, at least 72 hours (3 days), at least 94 hours, at least 106 hours (4 days) or more. In some embodiments, the reporter cells are treated for between 24 and 72 hours or between 36 and 60 hours.

[0085] The protein domain is identified as a transcriptional activator when log 2 of the ratio of sequencing counts from reporter cells not having the surface marker, the fluorescent protein, or a combination thereof to sequencing counts from reporter cells having the surface marker, the fluorescent protein, or a combination thereof is at least two standard deviations from (e.g., less than) the mean of a negative control. (See FIG. 5B, for example).

### 3. Transcription Factors

[0086] The present disclosure also provides synthetic transcription factors comprising one or more transcriptional effector domains fused to a heterologous DNA binding domain. As used herein, the term “transcription factor” refers to a protein or polypeptide that interacts with, directly or indirectly, specific DNA sequences associated with a genomic locus or gene of interest to block or recruit RNA polymerase activity to the promoter site for a gene or set of genes.

[0087] In some embodiments the synthetic transcription factor comprises one or more transcriptional activator domains, one or more transcriptional repressor domains, or a combination thereof fused to a heterologous DNA binding domain. In some embodiments, the at least one of the one or more transcriptional activator domains or at least one of the one or more transcriptional repressor domains comprises an amino acid sequence having at least 70% (e.g., at least 70%, at least 75%, at least 80%, at least 85%, at least 90%, at least 95%, at least 98%, 99%) identity to any of SEQ ID NOs: 1-896. In some embodiments, the one or more transcriptional activator domain, the one or more transcriptional repressor domain, or combination thereof is identified by the methods disclosed herein.

[0088] In some embodiments, the synthetic transcription factor comprises two or more transcription effector domains (e.g., transcriptional activator domains, transcriptional repressor domains, or a combination thereof) fused to a heterologous DNA binding domain. In some embodiments, the synthetic transcription factor comprises two or more transcriptional activator domains or two or more transcriptional repressors domains fused to a heterologous DNA binding domain. The two or more effector domains can be fused to the DNA binding domain in any orientation, and may be separated from each other with an amino acid linker.

[0089] In some embodiments, when the synthetic transcription factor comprises more than one transcription effector domains, the synthetic transcription factor may comprise at least one transcriptional activator domain or at least one transcriptional repressor domain as disclosed herein with at least one additional effector domain known in the art. See for example, Tycko J. et al., Cell. 2020 Dec. 23; 183(7):2020-2035, incorporated herein by reference in its entirety. In some embodiments, the one or more transcriptional activator domain, the one or more transcriptional repressor domain is identified by the methods described herein.

[0090] In some embodiments, when the synthetic transcription factor comprises more than one transcription effector domains, at least one of the one or more transcriptional activator domains comprises an amino acid sequence having at least 70% identity to any of SEQ ID NOs: 563-664. In some embodiments, at least one of the one or more transcriptional activator domains comprises an amino acid sequence having at least 70% identity to any of SEQ ID NOs: 563-596. In some embodiments, at least one of the one or more transcriptional activator domain is selected from those found in Table 2.

[0091] In some embodiments, when the synthetic transcription factor comprises more than one transcription effector domains, at least one of the one or more transcriptional repressor domains comprises an amino acid sequence having at least 70% identity to any of SEQ ID NOs: 1-562 and 665-896. In some embodiments, at least one of the one or more transcriptional repressor domains comprises an amino acid sequence having at least 70% identity to any of SEQ ID NO: 666. In some embodiments, at least one of the one or more transcriptional repressor domains is selected from those found in any of Tables 1, 3, or 4.

[0092] The DNA binding domain is any polypeptide which is capable of binding double- or single-stranded DNA, generally or with sequence specificity. DNA binding domains include those polypeptides having helix-turn-helix motifs, zinc fingers, leucine zippers, HMG-box (high mobility group box) domains, winged helix region, winged helix-turn-helix region, helix-loop-helix region, immunoglobulin fold, B3 domain, Wor3 domain, TAL effector DNA-binding domain and the like. The heterologous DNA binding domains may be a natural binding domain. In some embodiments, the heterologous DNA binding domain comprises a programmable DNA binding domain, e.g., a DNA binding domain engineered, for example by altering one or more amino acid of a natural DNA binding domain to bind to a predetermined nucleotide sequence.

[0093] In some embodiments, the DNA binding domain is capable of binding directly to the target DNA sequences.

[0094] The DNA-binding domain may be derived from domains found in naturally occurring Transcription activator-like effectors (TALEs), such as AvrBs3, Hax2, Hax3 or Hax4 (Bonas et al. 1989. Mol Gen Genet 218(1): 127-36; Kay et al. 2005 Mol Plant Microbe Interact 18(8): 838-48). TALEs have a modular DNA-binding domain consisting of repetitive sequences of residues; each repeat region consists of 34 amino acids. A pair of residues at the 12th and 13th position of each repeat region determines the nucleotide specificity and combining of the regions allows synthesis of sequence-specific TALE DNA-binding domains. In some embodiments, the TALE DNA binding domains may be engineered using known methods to provide a DNA binding domain with chosen specificity for any target sequence. The DNA binding domain may comprise multiple (e.g., 2, 3, 4, 5, 6, 10, 20, or more) Tal effector DNA-binding motifs. In particular, any number of nucleotide-specific Tal effector motifs can be combined to form a sequence-specific DNA-binding domain to be employed in the present transcription factor.

[0095] In some embodiments, the DNA binding domain associates with the target DNA in concert with an exogenous factor.

[0096] In some embodiments, the DNA binding domain is derived from a Clustered Regularly Interspaced Short Palindromic Repeats associated (Cas) protein (e.g., catalytically dead Cas9) and associates with the target DNA through a guide RNA. The gRNA itself comprises a sequence complementary to one strand of the DNA target sequence and a scaffold sequence which binds and recruits Cas9 to the target DNA sequence. The transcription factors described herein may be useful for CRISPR interference (CRISPRi) or CRISPR activation (CRISPRa).

[0097] The guide RNA (gRNA) may be a crRNA, crRNA/tracrRNA (or single guide RNA, sgRNA). The gRNA may be a non-naturally occurring gRNA. The terms “gRNA,” “guide RNA” and “guide sequence” may be used interchangeably throughout and refer to a nucleic acid comprising a sequence that determines the binding specificity of the Cas protein. A gRNA hybridizes to (complementary to, partially or completely) the DNA target sequence.

[0098] The gRNA or portion thereof that hybridizes to the target nucleic acid (a target site) may be any length necessary for selective hybridization. gRNAs or sgRNA(s) can be between about 5 and about 100 nucleotides long, or longer (e.g., 5, 6, 7, 8, 9, 10, 11, 12, 13, 14, 15, 16, 17, 18, 19, 20, 21, 22, 23, 24, 25, 26, 27, 28, 29, 30, 31, 32, 33, 34, 35, 36, 37, 38, 39, 40, 41, 42, 43, 44, 45, 46, 47, 48, 49, 50, 51, 52, 53, 54, 55, 56, 57, 58, 59 60, 61, 62, 63, 63, 64, 65, 66, 67, 68, 69, 70, 71, 72, 73, 74, 75, 76, 77, 78, 79, 80, 81, 82, 83, 84, 85, 86, 87, 88, 89, 90, 91 92, 93, 94, 95, 96, 97, 98, 99, or 100 nucleotides in length, or longer).

[0099] To facilitate gRNA design, many computational tools have been developed (See Prykhozhij et al. (PLoS ONE, 10(3): (2015)); Zhu et al. (PLoS ONE, 9(9) (2014)); Xiao et al. (Bioinformatics. January 21 (2014)); Heigwer et al. (Nat Methods, 11(2). 122-123 (2014)). Methods and tools for guide RNA design are discussed by Zhu (Frontiers in Biology, 10 (4) pp 289-296 (2015)), which is incorporated by reference herein. Additionally, there are many publicly available software tools that can be used to facilitate the design of sgRNA(s); including but not limited to, Genscript Interactive CRISPR gRNA Design Tool, WU-CRISPR, and Broad Institute GPP sgRNA Designer. There are also publicly available pre-designed gRNA sequences to target many genes and locations within the genomes of many species (human, mouse, rat, zebrafish, C. elegans), including but not limited to, IDT DNA Predesigned Alt-R CRISPR-Cas9 guide RNAs, Addgene Validated gRNA Target Sequences, and GenScript Genome-wide gRNA databases.

[0100] The present disclosure also provides nucleic acids encoding a synthetic transcription factor or a transcriptional effector (e.g., activator or repressor) domain, as disclosed herein. For example, the effector domains may be encoded by nucleic acids disclosed in Tables 1-3. In some embodiments, the effector domains may be encoded by nucleic acids having at least 70% identity to any of SEQ ID NOs: 897-1329. In some embodiments, the nucleic acid encodes one or more synthetic transcription factor or one or more effector domain.

[0101] Nucleic acids of the present disclosure can comprise any of a number of promoters known to the art, wherein the promoter is constitutive, regulatable or inducible, cell type specific, tissue-specific, or species specific. In addition to the sequence sufficient to direct transcription, a promoter sequence of the invention can also include sequences of other regulatory elements that are involved in modulating transcription (e.g., enhancers, Kozak sequences and introns). Many promoter/regulatory sequences useful for driving constitutive expression of a gene are available in the art and include, but are not limited to, for example, CMV (cytomegalovirus promoter), EF1a (human elongation factor 1 alpha promoter), SV40 (simian vacuolating virus 40 promoter), PGK (mammalian phosphoglycerate kinase promoter), Ubc (human ubiquitin C promoter), human beta-actin promoter, rodent beta-actin promoter, CBh (chicken beta-actin promoter), CAG (hybrid promoter contains CMV enhancer, chicken beta actin promoter, and rabbit beta-globin splice acceptor), TRE (Tetracycline response element promoter), H1 (human polymerase III RNA promoter), U6 (human U6 small nuclear promoter), and the like. Additional promoters that can be used for expression of the components of the present system, include, without limitation, cytomegalovirus (CMV) intermediate early promoter, a viral LTR such as the Rous sarcoma virus LTR, HIV-LTR, HTLV-1 LTR, Maloney murine leukemia virus (MMLV) LTR, myeoloproliferative sarcoma virus (MPSV) LTR, spleen focus-forming virus (SFFV) LTR, the simian virus 40 (SV40) early promoter, herpes simplex tk virus promoter, elongation factor 1-alpha (EF1-α) promoter with or without the EF1-α intron. Additional promoters include any constitutively active promoter. Alternatively, any regulatable promoter may be used, such that its expression can be modulated within a cell.

[0102] Moreover, inducible expression can be accomplished by placing the nucleic acid encoding such a molecule under the control of an inducible promoter/regulatory sequence. Promoters that are well known in the art can be induced in response to inducing agents such as metals, glucocorticoids, tetracycline, hormones, and the like, are also contemplated for use with the invention. Thus, it will be appreciated that the present disclosure includes the use of any promoter/regulatory sequence known in the art that is capable of driving expression of the desired protein operably linked thereto.

[0103] The present disclosure also provides for vectors containing the nucleic acids and cells containing the nucleic acids or vectors, thereof. The vectors may be used to propagate the nucleic acid in an appropriate cell and/or to allow expression from the nucleic acid (e.g., an expression vector). The person of ordinary skill in the art would be aware of the various vectors available for propagation and expression of a nucleic acid sequence.

[0104] To construct cells that express the present transcription factors, expression vectors for stable or transient expression of the present system may be constructed via conventional methods and introduced into cells. For example, nucleic acids encoding the components the disclose transcription factors, or other nucleic acids or proteins, may be cloned into a suitable expression vector, such as a plasmid or a viral vector in operable linkage to a suitable promoter. The selection of expression vectors/plasmids/viral vectors should be suitable for integration and replication in eukaryotic cells.

[0105] In certain embodiments, vectors of the present disclosure can drive the expression of one or more sequences in mammalian cells using a mammalian expression vector. Examples of mammalian expression vectors include pCDM8 (Seed, Nature (1987) 329:840, incorporated herein by reference) and pMT2PC (Kaufman, et al., EMBO J. (1987) 6:187, incorporated herein by reference). When used in mammalian cells, the expression vector's control functions are typically provided by one or more regulatory elements. For example, commonly used promoters are derived from polyoma, adenovirus 2, cytomegalovirus, simian virus 40, and others disclosed herein and known in the art. For other suitable expression systems for both prokaryotic and eukaryotic cells see, e.g., Chapters 16 and 17 of Sambrook, et al., MOLECULAR CLONING: A LABORATORY MANUAL. 2nd eds., Cold Spring Harbor Laboratory, Cold Spring Harbor Laboratory Press, Cold Spring Harbor, N.Y., 1989, incorporated herein by reference.

[0106] The vectors of the present disclosure may direct the expression of the nucleic acid in a particular cell type (e.g., tissue-specific regulatory elements are used to express the nucleic acid). Such regulatory elements include promoters that may be tissue specific or cell specific. The term “tissue specific” as it applies to a promoter refers to a promoter that is capable of directing selective expression of a nucleotide sequence of interest to a specific type of tissue (e.g., seeds) in the relative absence of expression of the same nucleotide sequence of interest in a different type of tissue. The term “cell type specific” as applied to a promoter refers to a promoter that is capable of directing selective expression of a nucleotide sequence of interest in a specific type of cell in the relative absence of expression of the same nucleotide sequence of interest in a different type of cell within the same tissue. The term “cell type specific” when applied to a promoter also means a promoter capable of promoting selective expression of a nucleotide sequence of interest in a region within a single tissue. Cell type specificity of a promoter may be assessed using methods well known in the art, e.g., immunohistochemical staining.

[0107] Additionally, the vector may contain, for example, some or all of the following: a selectable marker gene for selection of stable or transient transfectants in host cells; transcription termination and RNA processing signals; 5′- and 3′-untranslated regions; internal ribosome binding sites (IRESes), versatile multiple cloning sites; and reporter gene for assessing expression of the chimeric receptor. Suitable vectors and methods for producing vectors containing transgenes are well known and available in the art. Selectable markers include chloramphenicol resistance, tetracycline resistance, spectinomycin resistance, neomycin, streptomycin resistance, erythromycin resistance, rifampicin resistance, bleomycin resistance, thermally adapted kanamycin resistance, gentamycin resistance, hygromycin resistance, trimethoprim resistance, dihydrofolate reductase (DHFR), GPT; the URA3, HIS4, LEU2, and TRP1 genes of S. cerevisiae.

[0108] When introduced into a cell, the vectors may be maintained as an autonomously replicating sequence or extrachromosomal element or may be integrated into host DNA.

[0109] Thus, the disclosure further provides for cells comprising a synthetic transcription factor, a nucleic acid, or a vector, as disclosed herein.

[0110] Conventional viral and non-viral based gene transfer methods can be used to introduce the nucleic acids into cells, tissues, or a subject. Such methods can be used to administer the nucleic acids to cells in culture, or in a host organism. Non-viral vector delivery systems include DNA plasmids, cosmids, RNA (e.g., a transcript of a vector described herein), a nucleic acid, and a nucleic acid complexed with a delivery vehicle.

[0111] Viral vector delivery systems include DNA and RNA viruses, which have either episomal or integrated genomes after delivery to the cell. A variety of viral constructs may be used to deliver the present nucleic acids to the cells, tissues and/or a subject. Viral vectors include, for example, retroviral, lentiviral, adenoviral, adeno-associated and herpes simplex viral vectors. Nonlimiting examples of such recombinant viruses include recombinant adeno-associated virus (AAV), recombinant adenoviruses, recombinant lentiviruses, recombinant retroviruses, recombinant herpes simplex viruses, recombinant poxviruses, phages, etc. The present disclosure provides vectors capable of integration in the host genome, such as retrovius or lentivirus. See, e.g., Ausubel et al., Current Protocols in Molecular Biology, John Wiley & Sons, New York, 1989; Kay, M. A., et al., 2001 Nat. Medic. 7(1):33-40; and Walther W. and Stein U., 2000 Drugs, 60(2): 249-71, incorporated herein by reference.

[0112] The nucleic acids or transcription factors may be delivered by any suitable means. In certain embodiments, the nucleic acids or proteins thereof are delivered in vivo. In other embodiments, the nucleic acids or proteins thereof are delivered to isolated/cultured cells in vitro or ex vivo to provide modified cells useful for in vivo delivery to patients afflicted with a disease or condition.

[0113] Vectors according to the present disclosure can be transformed, transfected, or otherwise introduced into a wide variety of host cells. Transfection refers to the taking up of a vector by a cell whether or not any coding sequences are in fact expressed. Numerous methods of transfection are known to the ordinarily skilled artisan, for example, lipofectamine, calcium phosphate co-precipitation, electroporation, DEAE-dextran treatment, microinjection, viral infection, and other methods known in the art. Transduction refers to entry of a virus into the cell and expression (e.g., transcription and/or translation) of sequences delivered by the viral vector genome. In the case of a recombinant vector, “transduction” generally refers to entry of the recombinant viral vector into the cell and expression of a nucleic acid of interest delivered by the vector genome.

[0114] Methods of delivering vectors to cells are well known in the art and may include DNA or RNA electroporation, transfection reagents such as liposomes or nanoparticles to delivery DNA or RNA; delivery of DNA, RNA, or protein by mechanical deformation (see, e.g., Sharei et al. Proc. Natl. Acad. Sci. USA (2013) 110(6): 2082-2087, incorporated herein by reference); or viral transduction. In some embodiments, the vectors are delivered to host cells by viral transduction. Nucleic acids can be delivered as part of a larger construct, such as a plasmid or viral vector, or directly, e.g., by electroporation, lipid vesicles, viral transporters, microinjection, and biolistics (high-speed particle bombardment). Similarly, the construct containing the one or more transgenes can be delivered by any method appropriate for introducing nucleic acids into a cell. In some embodiments, the construct or the nucleic acid encoding the components of the present system is a DNA molecule. In some embodiments, the nucleic acid encoding the components of the present system is a DNA vector and may be electroporated to cells. In some embodiments, the nucleic acid encoding the components of the present system is an RNA molecule, which may be electroporated to cells.

[0115] Additionally, delivery vehicles such as nanoparticle- and lipid-based delivery systems can be used. Further examples of delivery vehicles include lentiviral vectors, ribonucleoprotein (RNP) complexes, lipid-based delivery system, gene gun, hydrodynamic, electroporation or nucleofection microinjection, and biolistics. Various gene delivery methods are discussed in detail by Nayerossadat et al. (Adv Biomed Res. 2012; 1: 27) and Ibraheem et al. (Int J Pharm. 2014 Jan. 1; 459(1-2):70-83), incorporated herein by reference.

[0116] As such, the disclosure provides an isolated cell comprising the vector(s) or nucleic acid(s) disclosed herein. Preferred cells are those that can be easily and reliably grown, have reasonably fast growth rates, have well characterized expression systems, and can be transformed or transfected easily and efficiently. Examples of suitable prokaryotic cells include, but are not limited to, cells from the genera Bacillus (such as Bacillus subtilis and Bacillus brevis), Escherichia (such as E. coli), Pseudomonas, Streptomyces, Salmonella, and Envinia. Suitable eukaryotic cells are known in the art and include, for example, yeast cells, insect cells, and mammalian cells. Examples of suitable yeast cells include those from the genera Kluyveromyces, Pichia, Rhino-sporidium, Saccharomyces, and Schizosaccharomyces. Exemplary insect cells include Sf-9 and HIS (Invitrogen, Carlsbad, Calif.) and are described in, for example, Kitts et al., Biotechniques, 14: 810-817 (1993); Lucklow, Curr. Opin. Biotechnol., 4: 564-572 (1993); and Lucklow et al., J. Virol., 67: 4566-4579 (1993), incorporated herein by reference. Desirably, the cell is a mammalian cell, and in some embodiments, the cell is a human cell. A number of suitable mammalian and human host cells are known in the art, and many are available from the American Type Culture Collection (ATCC, Manassas, Va.). Examples of suitable mammalian cells include, but are not limited to, Chinese hamster ovary cells (CHO) (ATCC No. CCL61), CHO DHFR-cells (Urlaub et al., Proc. Natl. Acad. Sci. USA, 97: 4216-4220 (1980)), human embryonic kidney (HEK) 293 or 293T cells (ATCC No. CRL1573), and 3T3 cells (ATCC No. CCL92). Other suitable mammalian cell lines are the monkey COS-1 (ATCC No. CRL1650) and COS-7 cell lines (ATCC No. CRL1651), as well as the CV-1 cell line (ATCC No. CCL70). Further exemplary mammalian host cells include primate, rodent, and human cell lines, including transformed cell lines. Normal diploid cells, cell strains derived from in vitro culture of primary tissue, as well as primary explants, are also suitable. Other suitable mammalian cell lines include, but are not limited to, mouse neuroblastoma N2A cells, HeLa, HEK, A549, HepG2, mouse L-929 cells, and BHK or HaK hamster cell lines.

[0117] Methods for selecting suitable mammalian cells and methods for transformation, culture, amplification, screening, and purification of cells are known in the art.

[0118] The present invention is also directed to compositions or systems comprising a synthetic transcription factor, a nucleic acid, a vector, or a cell, as described herein. In some embodiments, the compositions or system comprises two or more synthetic transcription factors, nucleic acids, vectors, or cells.

[0119] In some embodiments, the composition or system further comprises a gRNA. The gRNA may be encoded on the same nucleic acid as a synthetic transcription factor or a different nucleic acid. In some embodiments, the vector encoding a synthetic transcription factor may further encode a gRNA, under the same or different promoter. In some embodiments, the gRNA is encoded on its own vector, separated from that of the transcription factor.

### 4. Methods of Modulating Gene Expression

[0120] The present disclosure also provides methods of modulating the expression of at least one target gene in a cell, the method comprising introducing into the cell at least one synthetic transcription factor, nucleic acid, vector, or composition or system as described herein. In some embodiments, the gene expression of at least two genes is modulated.

[0121] Modulation of expression comprises increasing or decreasing gene expression compared to normal gene expression for the target gene. When the gene expression of at least two genes is modulation, both genes may have increased gene expression, both gene may have decreased gene expression, or one gene may have increased gene expression and the other may have decreased gene expression.

[0122] The cell may be a prokaryotic or eukaryotic cell. In preferred embodiments, the cell is a eukaryotic cell. In some embodiments, the cell is in vitro. In some embodiments, the cell is ex vivo.

[0123] In some embodiments, the cell is in an organism or host, such that introducing the disclosed systems, compositions, vectors into the cell comprises administration to a subject. The method may comprise providing or administering to the subject, in vivo, or by transplantation of ex vivo treated cells, at least one synthetic transcription factor, nucleic acid, vector, or composition or system as described herein.

[0124] A “subject” may be human or non-human and may include, for example, animal strains or species used as “model systems” for research purposes, such a mouse model as described herein. Likewise, subject may include either adults or juveniles (e.g., children). Moreover, subject may mean any living organism, preferably a mammal (e.g., human or non-human) that may benefit from the administration of compositions contemplated herein. Examples of mammals include, but are not limited to, any member of the Mammalian class: humans, non-human primates such as chimpanzees, and other apes and monkey species; farm animals such as cattle, horses, sheep, goats, swine; domestic animals such as rabbits, dogs, and cats; laboratory animals including rodents, such as rats, mice and guinea pigs, and the like. Examples of non-mammals include, but are not limited to, birds, fish, and the like. In one embodiment of the methods and compositions provided herein, the mammal is a human.

[0125] As used herein, the terms “providing”, “administering,” “introducing,” are used interchangeably herein and refer to the placement of the systems of the disclosure into a subject by a method or route which results in at least partial localization of the system to a desired site. The systems can be administered by any appropriate route which results in delivery to a desired location in the subject.

### 5. Kits

[0126] Also within the scope of the present disclosure are kits including at least one or all of at least one nucleic acid encoding an effector domain, or a DNA binding domain, or a combination thereof, at least one synthetic transcription factor, or nucleic acid encoding thereof, vectors encoding at least one effector domain or at least one synthetic transcription factor, a composition or system as described herein, a cell comprising an effector domain, a DNA binding domain, a synthetic transcription factor, or a nucleic acid encoding any of thereof, a reporter cell as described herein and a two-part reporter gene as described herein or a nucleic acid encoding thereof.

[0127] The kits can also comprise instructions for using the components of the kit. The instructions are relevant materials or methodologies pertaining to the kit. The materials may include any combination of the following: background information, list of components, brief or detailed protocols for using the compositions, trouble-shooting, references, technical support, and any other related documents. Instructions can be supplied with the kit or as a separate member component, either as a paper form or an electronic form which may be supplied on computer readable memory device or downloaded from an internet website, or as recorded presentation.

[0128] It is understood that the disclosed kits can be employed in connection with the disclosed methods. The kit may include instructions for use in any of the methods described herein. The instructions can comprise a description of use of the components for the methods of identifying repressor domains or methods of modulating gene expression.

[0129] The kits provided herein are in suitable packaging. Suitable packaging includes, but is not limited to, vials, bottles, jars, flexible packaging, and the like.

[0130] Kits optionally may provide additional components such as buffers and interpretive information. Normally, the kit comprises a container and a label or package insert(s) on or associated with the container. In some embodiment, the disclosure provides articles of manufacture comprising contents of the kits described above.

[0131] The kit may further comprise a device for holding or administering the present system or composition. The device may include an infusion device, an intravenous solution bag, a hypodermic needle, a vial, and/or a syringe.

[0132] The present disclosure also provides for kits for performing the methods or producing the components in vitro. The kit may include the components of the present system. Optional components of the kit include one or more of the following: (1) buffer constituents, (2) control plasmid, (3) sequencing primers.

### 6. Examples

[0133] Human gene expression is regulated by thousands of proteins that activate or repress transcription. We lack a complete and quantitative description of these proteins' effector domains, the domains sufficient to mediate changes in gene expression. To systematically measure transcriptional effector domains in human cells, provided herein is a high-throughput assay in which libraries of protein domains are fused to a DNA-binding domain and recruited to a reporter gene. The cells are then separated by reporter expression level and the library of protein domains is sequenced. The reporter is a synthetic surface marker that facilitates simple separation of tens of millions of cells into high- and low-expression populations, using magnetic beads.

[0134] Gene silencing and epigenetic memory was quantified after recruitment of all nuclear protein domains of ≤80 amino acids. Using the measurements for the complete families of >300 KRAB domains and >200 Homeodomains, relationships were discovered between transcription factor's repressor domain strength and their evolutionary history and developmental role. Further, a deep mutational scan of the ZNF10 KRAB effector function and identified substitutions with enhanced stability and repression compared to the KRAB domain used in CRISPRi. To search for effector domains beyond previously annotated regions, the sequence of 238 repressor complex proteins was tiled and novel repressor domains as short as 10 amino acids were discovered in unannotated regions of large chromatin regulators, including the non-canonical polycomb 1.6 recruitment protein MGA. Greater than 20 repressors were individually characterized and all of them were found to silence a reporter gene in an all-or-nothing fashion at the single-cell level, but with distinct dynamics of silencing and epigenetic memory.

[0135] In addition, new activator domains in nuclear proteins were discovered, including a highly divergent acidic KRAB domain variant.

[0136] Together, these results demonstrate a strategy for systematic measurement of transcriptional effector domain activity in human cells, and expand the number of compact transcriptional effector domains that can be applied in synthetic transcription and epigenetic perturbation technologies.

[0137] Problems addressed by the present technology.
[0138] i. Unknown which genes have effector function
[0139] ii. Within known TF/CR genes, often unknown which domains have this function
[0140] iii. Within domain families including known effector domains, unknown which family members have this function
[0141] iv. Within known effector domains, unknown which residues are necessary, and how mutations reduce or enhance function

[0142] The systems and methods provided herein can measure regulatory domains of activators and repressors capability to change the output from a reporter promoter. Historically, this requires low throughput work so relatively few effector domains have been measured. The systems and methods provided herein off an alternative high-throughput assay.

[0143] The systems and methods find use, for example, for: a. understanding gene regulation, predicting function of non-coding regulatory elements that these proteins bind to; and b. identifying effector domains for epigenome perturbation tools.

[0144] Previously, a limited number of transcriptional effector domains were available for the engineering of synthetic transcription factors. To address this limitation, provided herein is a high-throughput approach to screening and quantifying the function of transcriptional effectors domains. This approach enabled the discovery of hundreds of effector domains that can upregulate or downregulate transcription in a targeted manner when fused onto a DNA binding domain. This process also identifies mutants of effector domains with enhanced activity. These effector domains can be used to engineer synthetic transcription factors for applications in gene and cell therapy, synthetic biology, and functional genomics.

[0145] The new transcriptional effector domains provided herein have several advantages for applications that rely on synthetic transcription factors. We identify short domains (≤80 amino acids) and a high-throughput process for shortening them further to the minimally sufficient sequence, which is an advantage for delivery (e.g., packaging in viral vectors). In some cases, we identify potent effector domains that are as short as 10 amino acids. The domains are extracted from human proteins, which provides the advantage of reducing immunogenicity in comparison to viral effector domains. Most of these domains have not been reported as transcriptional effectors previously.

[0146] By performing high-throughput recruitment with the Pfam domain library against both a strong pEF promoter and a weak minCMV promoter, both repressor and activator domains were able to be measured. One possible reason that many more repressors were found is that they are more often autonomous stably-folding sequences which meet the Pfam definition of a domain while TADs are more often disordered or low-complexity regions that are not annotated as domains. Another possible reason could be that co-activators are more limiting in the nucleus than co-repressors (Gillespie Mol Cell 2020), which implies lower expression of activator domains could result in greater activation strength, but this effect would not be expected to completely mask signal in the screen. New library designs that tile transcription factors or focus on regions with TAD-like signatures (e.g., acidity) will uncover additional activator domains.

[0147] In addition, a high-throughput process for testing mutations in these domains in order to identify enhanced variants is disclosed herein. The high-throughput approach is more readily enabled by development of an artificial cell surface marker that provides more efficient, inexpensive, and rapid screening of these libraries using magnetic separation. This is an advantage over the more conventional approach of sorting libraries based on fluorescent reporter gene expression.

### Example 1

### HT-Recruit Identifies Hundreds of Repressor Domains in Human Proteins

[0148] In order to turn the classical recruitment reporter assay into a high-throughput assay of transcriptional domains, two problems were solved: (1) modification of the reporter to make it compatible with rapid screening of libraries of tens of thousands of domains, and (2) development of a strategy to generate a library of candidate effector domains. To improve on the previously published fluorescent reporter (Bintu et al., 2016), a synthetic surface marker was engineered to enable facile magnetic separation of large numbers of cells and the reporter was integrated in a suspension cell line amenable to cell culture in large volume spinner flasks. Specifically, K562 reporter cells with 9×TetO binding sites upstream of a strong constitutive pEF1a promoter that drives expression of a two-part reporter consisting of a synthetic surface marker (the human IgG1 Fc region linked to an Igκ leader and PDGFRβ transmembrane domain) and a fluorescent citrine protein (FIG. 1) were generated. Flow cytometry confirmed that recruitment of a known repressor domain, the KRAB domain from the zinc finger transcription factor ZNF10, at the TetO sites silenced this reporter in a doxycycline-dependent manner within 5 days (FIGS. 7 and 16A and 16B). Magnetic separation with ProG Dynabeads that bind to the synthetic surface marker separated cells with the reporter ON from OFF cells (FIGS. 7 and 16C).

[0149] Sequences were pulled from the UniProt database for Pfam-annotated domains in human proteins that can localize to the nucleus (including non-exclusively nuclear-localized proteins). In total, 14,657 domains were retrieved. Of these, 72% were less than or equal to 80 amino acids (AA) long (FIG. 1), which made them compatible with pooled synthesis as 300 base oligonucleotides. For domains shorter than 80 AA, the domain sequence was extended on both ends with the adjacent residues from the native protein sequence in order to reach a length of 80 AA and avoid PCR amplification biases. 861 negative controls that were either random 80 AA sequences or 80 AA sequences tiled along the DMD protein with a 10 AA tiling window were added. The DMD protein was not localized in the nucleus (Chevron et al., 1994), and thus unlikely to feature domains with transcriptional activity. The library was cloned for lentiviral expression as a fusion protein with either the rTetR doxycycline-inducible DNA-binding domain alone, or with a 3×-FLAG-tagged rTetR (FIGS. 17A and 8) and delivered to K562 reporter cells (FIG. 1).

[0150] Before assaying for transcriptional activity, it was determined which protein domains were well-expressed in K562 cells using a high-throughput approach (FIGS. 17A and 8). The library of cells was stained with an anti-FLAG fluorescent-labeled antibody, sorted the cells into two bins (FIGS. 17B and 8), genomic DNA was extracted, and the frequency of each domain by amplicon sequencing was counted. The sequencing counts were used to compute the enrichment ratio in the FLAGhigh versus FLAGlow population for each domain, as a measure of expression level. These measurements were reproducible between separately transduced biological replicates (r²=0.82, FIGS. 17C and 8), and highly correlated with individual domain fusion expression levels measured by Western blot (r²=0.92, FIGS. 17D and 17E and 8). Native Pfam domains were significantly better-expressed than the random sequence controls (p<1e-5, Mann Whitney test), while the Pfam domains and the DMD tiling controls were similarly well-expressed (FIGS. 17F and 8). A threshold was set to identify well-expressed domains with a FLAGhigh:FLAGlow ratio one standard deviation above the median of the random controls. By this definition, 66% of the Pfam domains were well-expressed; these domains were the focus of further analysis.

[0151] The Pfam domain library was screened for transcriptional repressors. The pooled library of cells was treated with doxycycline for 5 days, which gave sufficient time after transcriptional silencing for the reporter mRNA and protein to degrade and dilute out due to cell division, resulting in a clear bimodal mixture of ‘ON’ and ‘OFF’ cells (FIGS. 18A and 9). Then, magnetic cell separation (FIGS. 18A and 9) and domain sequencing were performed, then the log 2(OFF:ON) ratio was computed for each library member using the read counts in the unbound and bead-bound populations (FIG. 1). For clarity, the bead-bound population was referred to as ‘ON’ and the unbound population as ‘OFF’. The measurements were highly reproducible between separately transduced biological replicates (r²=0.96, FIG. 1). Domains were called as hits when they caused repression that was more than 2 standard deviations above the mean of the poorly expressed negative controls. This resulted in 446 repressor hits at day 5, with domains from 63 domain families (FIG. 12A). These repressor domains are found in 451 human proteins, because in some cases the exact same domain sequence occurs in multiple genes. Known repressor domains (e.g., KRAB from human ZNF10, Chromoshadow from CBX5) from 10 domain families described as repressors or co-repressor-binding domains by Pfam were among the hits. To measure epigenetic memory, additional time points were taken at days 9 and 13. The set of proteins containing hits was significantly enriched for transcription factors and chromatin regulators when compared to all nuclear proteins used in the library, but different categories of proteins were differentially enriched when classified by their memory levels (FIGS. 18B and 9). Specifically, the repressors with high memory (cells remaining OFF) at day 13 were most enriched for C2H2 zinc finger transcription factors which include KRAB ZNF proteins, and the repressors with low memory were most enriched for homeodomain transcription factors which include the Hox proteins. Overall, the very high reproducibility and identification of expected positive control repressor domains among the hits suggested the screening method, called HT-recruit, yielded reliable results. Amino acid and nucleic acid sequences for repressors identified in the nuclear Pfam domain library are shown in Table 1, with higher scores indicating increased repression.

[0152] One of the strongest hits was the YAF2_RYBP, a domain present in the RING1- and YY1-binding protein (RYBP) and its paralog YY1-associated Factor 2 (YAF2), which are both components of the polycomb repressive complex 1 (PRC1) (Chittock et al., 2017; Garcia et al., 1999). The domain from the RYBP protein as annotated by Pfam (which is just 32 amino acids, thus shorter than the version synthesized in the 80 AA domain library) was individually tested and rapid silencing of the reporter gene was confirmed (FIG. 12B). RYBP-mediated silencing was also demonstrated in a recent report of full-length RYBP protein recruitment in mouse embryonic stem cells (Moussa et al., 2019; Zhao et al., 2020). The result established that the 32 AA RYBP domain, which has been shown by surface plasmon resonance to be the minimal required domain to bind the polycomb histone modifier enzyme RING1B (Wang et al., 2010), was sufficient to mediate silencing in cells.

[0153] To quantify repression kinetics, the citrine level distributions were gated to calculate a percentage of silenced cells with normalization of the uniform low level of background silencing in the untreated cells, and then the data was fit to a model with an exponential silencing rate during doxycycline treatment and an exponential decay (or reactivation) after doxycycline removal that plateaus at a constant irreversibly silent percentage of cells (FIG. 12C). Using this approach, the repressor function of SUMO3, the Chromo domain from MPP8, the Chromoshadow domain from CBX1, and the SAM_1/SPM domain from SCMH1 (FIGS. 18C-18F and 9), which all had previous support for repressor function from recruitment or co-repressor binding assays, were also validated (Chang et al., 2011; Chupreta et al., 2005; Frey et al., 2016; Lechner et al., 2000). Silencing rates from all individual measurements (for the repressor hits above and the other hits discussed below, FIGS. 18C-18K and 9) correlated well with the high-throughput measurements of silencing at day 5 (R²=0.86, FIG. 12D). These individual validations were performed using a new variant of the DNA binding domain rTetR (SE-G72P) that was engineered to mitigate leakiness in the absence of doxycycline in yeast (Roney et al., 2016), and which was found to not leak in human cells (FIGS. 19A and 19B), making it a useful tool for mammalian synthetic biology. This new rTetR variant has the same silencing strength at maximum doxycycline recruitment as the original rTetR (FIG. 19C), which was also evidenced by the high correlation between individual validations and screen scores (FIG. 12D). Together, these validation experiments demonstrated that HT-recruit both successfully identified bona fide repressors and quantified the repression strength for each domain with accuracy comparable to individual flow cytometry experiments.

### Example 2

### Identification of Domains of Unknown Function that Repress Transcription

[0154] Over 22% of the Pfam domain families are labeled as Domains of Unknown Function (DUFs), while others are not named using this label but are nevertheless DUFs (El-Gebali et al., 2019). These domains have recognizable sequence conservation but lack experimental characterization. As such, the high-throughput domain screen described herein offered the opportunity to associate initial functions with DUFs. First, DUF3669 domains were identified as repressor hits and individually validated by flow cytometry (FIGS. 12A-12C). These DUFs are natively found in KRAB zinc finger proteins, which is a gene family containing many repressive transcription factors. Concordant results demonstrating transcriptional repression after recruitment of two DUF3669 family domains were recently published (Al Chiblak et al., 2019), and the high-throughput results expand this finding to include the four remaining untested DUF3669 sequences. The HNF3 C-terminal domain, HNF_C, is another DUF, although it has a more specific name because it is only found in Hepatocyte Nuclear Factors 3 alpha and beta (also known as FOXA1 and 2). The HNF_C domains from both FOXA1 and 2 were also found as repressor hits. They both include a EH1 (engrailed homology 1) motif, characterized by the FxLxxIL sequence, that has been nominated as a candidate repressor motif (Copley, 2005).

[0155] All three of the IRF-2BP1_2 N-terminal zinc finger domains (Childs and Goodbourn, 2003), an uncharacterized domain found in the interferon regulatory factor 2 (IRF2) co-repressors IRF2BP1, IRF2BP2, and IRF2BPL, were repressor hits. The Cyt-b5 domain in the DNA repair factor HERC2 E3 ligase (Mifsud and Bateman, 2002) was another functionally uncharacterized domain that was validated as a strong repressor hit (FIGS. 18G and 9). The SH3_9 domain in BIN1 is a largely uncharacterized variant of the SH3 protein-binding domain, which was also validated as a repressor (FIGS. 18H and 9). BIN1 is a Myc-interacting protein and tumor suppressor (Elliott et al., 1999) that is also associated with Alzheimer's disease risk (Nott et al., 2019). Concordant with the results, both full-length BIN1 and a Myc-binding domain deletion mutant were previously shown to repress transcription in a Gal4 recruitment assay in HeLa cells (Elliott et al., 1999), and the BIN1 yeast homolog hob1 has been linked to transcriptional repression and histone methylation (Ramalingam and Prendergast, 2007). In addition, the repressor activity of the HMG_box domain from the transcription factor TOX and of the zf-C3HC4_2 RING finger domain from the polycomb component PCGF2 were validated (FIGS. 18I and 18J). Lastly, DUF1087 was found in CHD chromatin remodelers and, although its high-throughput measurement was just below the screen significance threshold (FIG. 12A), the CHD3 DUF1087 was validated as a weak repressor by individual flow cytometry (FIGS. 12B and 12C). Together, these results demonstrated that high-throughput protein domain screens can assign initial functions to DUFs and expand understanding of the functions of incompletely characterized domains.

### Example 3

### A Random Sequence with Strong Repressor Activity

[0156] Random sequences have not previously been tested for repressor activity. Surprisingly, one of the random 80 AA sequences, which were designed as negative controls, was a strong repressor hit with an average log 2(OFF:ON)=4.0, despite having a weak expression level below the threshold. Individual validation by flow cytometry confirmed that this sequence fully silenced the population of reporter cells after 5 days of recruitment with moderate epigenetic memory up to two weeks after doxycycline removal (FIGS. 18K and 9). One additional random sequence showed a repression score marginally above the hit threshold.

### Example 4

### Repressor KRAB Domains are Found in Younger Proteins

[0157] The data provided an opportunity to analyze the function of all effector domains in the largest family of transcription factors: the KRAB domains. The KRAB gene family includes some of the strongest known repressor domains (such as the KRAB in ZNF10). Previous studies of a subset of repressive KRAB domains revealed that they can repress transcription by interacting with the co-repressor KAP1, which in turn interacts with chromatin regulators such as SETDB1 and HP1 (Cheng et al., 2014). However, it remains unclear how many of the KRAB domains are repressors, and whether the recruitment of KAP1 is necessary or sufficient for repression across all KRABs.

[0158] The library included 335 human KRAB domains, and 92.1% were found as repressor hits after filtering for domains that were well-expressed. 9 repressor hit and 2 non-hit KRAB domains were individually validated by flow cytometry and these categorizations were confirmed in every case (FIG. 19D). Then, the domain recruitment results were compared with previously published immunoprecipitation mass spectrometry data generated from full-length KRAB protein pulldowns (Helleboid et al., 2019) and all but one of the non-repressive KRABs were in proteins that do not interact with KAP1 (the one exceptional KRAB was lowly expressed), and all of the repressor hit KRAB domains were KAP1 interactors (p<1e-9, Fisher's exact test, FIG. 2). Furthermore, available ChiP-seq and ChIP-exo datasets was analyzed (ENCODE Project Consortium et al., 2020; Imbeault et al., 2017; Najafabadi et al., 2015; Schmitges et al., 2016) and repressive KRAB domains were from KRAB Zinc Finger proteins that co-localize with KAP1, in contrast to non-repressive KRAB domains (FIG. 2).

[0159] Interestingly, repressive KRAB domains were mostly found in proteins with the simplest domain architecture consisting of just a KRAB domain and a zinc-finger array, while the non-repressive KRAB domains were mostly found in genes that also include a DUF3669 or SCAN domain (FIG. 2). In fact, only one KRAB in a DUF3669-containing gene, ZNF783, was a repressor. ZNF783 is an uncharacterized DUF3669-KRAB-containing gene that uniquely lacks a zinc finger array (despite its name), suggesting it is distinctive among this class of transcription factors in both its effector function and its mode of localizing to targets.

[0160] The compound domain architecture that included a SCAN or DUF3669 is more common in evolutionary old KRAB genes (Imbeault et al., 2017). Here, a clear relationship was observed between the evolutionary age of the KRAB genes and the KRAB repressor strength, with KRAB domains from genes pre-dating the marsupial-human common ancestor having no repressor activity, and KRAB domains from genes that evolved later consistently functioning as strong repressors (FIG. 2). Together, these results support a model of an ancient generation of non-repressor KRAB genes followed by a more recent massive expansion of repressor KRAB genes that recruit KAP1 to silence genomic targets.

### Example 5

### Deep Mutational Scan of the CRISPRi ZNF10 KRAB Effector Identifies Mutations that Modulate Gene Silencing

[0161] The KRAB domain from ZNF10 has been extensively used in synthetic biology applications for gene repression and is fused to dCas9 in the programmable epigenetic and transcriptional control tool known as CRISPR interference (Gilbert et al., 2014). To better understand its sequence-function relationships, a deep mutational scan (DMS) of this KRAB was performed domain using HT-recruit. A library with all possible single substitutions and all consecutive double and triple substitutions was designed (FIG. 3). To improve the ability to unambiguously align sequencing reads, variable codon usage was used to implement silent barcodes in the domain coding sequence such that the DNA sequences were more unique than the amino acid sequences (FIG. 3). HT-recruit was performed using the reporter and workflow in FIG. 1: 5 days of doxycycline induction and magnetic separation of ON and OFF cells at days 5, 9, and 13 (FIGS. 20A and 10). These measurements were highly reproducible and showed a general trend of increasing deleteriousness with increasing mutation length from singles to triples, as expected (FIGS. 20B and 10). Further, these results were compared with the KRAB amino acid conservation and a striking correlation was found between conservation and deleteriousness of mutations (FIG. 3). Amino acid and nucleic acid sequences for KRAB repressor mutants identified are shown in Table 3. Each repressor mutant score is shown relative to 0 for the wild-type sequence, with higher scores representing more enhanced KRAB transcriptional repression.

[0162] The ZNF10 KRAB effector has 3 components: the A-box which is necessary for binding KAP1 (Peng et al., 2009), the B-box which is thought to potentiate KAP1 binding (Peng et al., 2007), and an N-terminal extension that is natively found on a separate exon upstream of the KRAB domain (FIG. 3). Mutations at numerous positions in the A-box dramatically lowered repressor activity relative to the wildtype sequence (FIG. 3). Several of these mutations had previously been tested with a recruitment CAT assay in COS and 3T3 cells; those data correlated well with measurements from the deep mutational scan in K562 cells (FIG. 3). The complete lack of silencing function in an A-box KRAB mutant was also individually validated (FIG. 3). The mutational impacts across the Abox appeared to be periodic, suggesting the angle of these residues along an alpha helix could be functionally relevant (FIG. 3). These residues were designated as necessary for silencing (p<1e-5, Wilcoxon rank sum test comparing distribution of all substitutions against wild-type at day 5) and 12 necessary residues with strong mutational impacts in the A-box and one residue with significant but weak effects in the B-box were found (FIG. 3).

[0163] These substitutions were mapped onto an aligned mouse KRAB A-box structure (PDB. 1v65, 55% identity, 69% similarity in A-box [V13-Y54], FIGS. 20C and 10) and the necessary residues were found to be similarly oriented in 3D space, suggestive of a binding interface (FIGS. 3 and 20D, red, and 10). These residues may be important for KAP1 binding as 10 out of 12 of these A-box residues were in fact shown to facilitate KAP1 binding in a previous recombinant protein binding assay (Peng et al., 2009) using KRAB-O, which aligns to ZNF10 KRAB 12-71 (50% identity, 75% similarity) in a region containing all 12 of the necessary residues (red KRAB-O residues, FIGS. 20C and 10). The remaining 8 out of 8 residues previously found unnecessary for binding were also not necessary for repression in the DMS (p<1e-4, Fisher's exact test, grey KRAB-O residues, FIGS. 20C and 10). The DMS day 5 silencing scores were inspected for the individual single, double, and triple alanine substitutions used in the binding assay, and perfect agreement was found: mutations that ablated binding also abolished silencing (Z-score<−4 compared to wild-type distribution), and mutations that did not affect binding also did not affect silencing (|Z-score|<0.6) (p<0.01, n=12 mutations, Fisher's exact test). This high validation rate, and their positioning in the 3D structure, suggests the remaining 2 out of 12 necessary A-box residues from the DMS (V41 and N45) may also be involved in KAP1 binding.

[0164] In contrast to the A-box, B-box mutations showed relatively little effect at the end of recruitment (day 5), with only one statistically significant position (P59) showing consistent but weak effects. Meanwhile P59 and 4 other positions (K58, 162, L65, E66) showed a significant effect on memory after doxycycline removal as measured at day 9 (FIG. 3). Individual validations were performed for 4 significant positions and, as in the high-throughput experiment, the B-box mutants were strong gene silencers after day 5 of recruitment but showed reduced memory after doxycycline release (FIGS. 3 and 20E and 10). To interpret this result, the previously proposed gene silencing model in which silenced cells pass through a ‘reversibly silent’ state before entering an ‘irreversibly silent’ state was considered (Bintu et al., 2016). The B-box mutant memory reduction may be the result of a moderate silencing speed reduction, resulting in fewer cells committing to the irreversibly silent state by day 5, and that the mutational impact on silencing speed was masked because reversibly silent and irreversibly silent cells are indistinguishable at day 5. To test this possibility, the silencing time course was repeated with a 100-fold lower dose of doxycycline in order to tune down the recruitment strength. In this regime, the B-box mutations reduced silencing speed before day 5 (FIGS. 20E and 10). This result shows the B-box has a partial contribution to KRAB silencing speed.

[0165] Lastly, the KRAB N-terminus contained residues where many substitutions consistently enhanced silencing relative to wild-type (FIGS. 3, blue, day 13 panels). In particular, nearly all substitutions for the tryptophan at position 8 led to higher numbers of cells silenced relative to wild-type at day 13 (which is the time point with the most dynamic range to detect silencing levels above wild-type). This was the only significant position for enhanced silencing (FIG. 3). The memory enhancement for two of the highest-ranked of these mutants (WSR8EEE and AW7EE) was individually validated with high-doxycycline recruitment (FIGS. 3 and 20E and 10).

[0166] This silencing enhancement may have been a result of enhanced KRAB protein expression level. To investigate the relationship between protein expression level and KRAB silencing strength, the high-throughput FLAG-tag expression level measurements for the set of KAP1-binding KRAB domains was inspected and a significant correlation was found between KRAB expression level and silencing at day 13 (r²=0.49, FIGS. 20F and 10). Most relevant to the deep mutational scan results, ZNF10 KRAB had lower expression levels compared to other KRAB domains that showed higher day 13 silencing levels, implying that it could be improved via mutations. Notably, the N-terminus was very poorly conserved (FIG. 3) and was in fact uniquely found in the KRAB from ZNF10 by BLAST, suggesting that stability-improving mutations in the N-terminus would be unlikely to interfere with KRAB function. In addition, across the entire domain expression higher tryptophan (W) frequency was observed in a domain that was negatively correlated with expression level while higher glutamic acid (E) frequency was positively correlated with expression level (FIGS. 20G and 10). This amino acid composition trend further suggested that the N-terminal KRAB mutant enhancements could be due to improved expression level, as substituting out the tryptophan from KRAB position 8 enhanced its effector function and that this enhancement was most pronounced when substituting with glutamic acid. A Western blot for the ZNF10 KRAB variants confirmed that the N-terminal glutamic acid substitution mutants were more highly expressed than the wild-type (FIGS. 20H and 10). Together, these results demonstrated the use of a deep mutational scan both to map sequence-to-function for a human transcriptional repressor and to improve effectors by incorporating expression-enhancing substitutions into poorly conserved positions.

### Example 6

### Homeodomain Repressor Strength is Colinear with Hox Gene Organization

[0167] The second largest domain family that included repressor hits in the screen was the homeodomain family. Homeodomains are composed of 3 helices and are sequence-specific DNA binding domains that make base contacts through Helix 3 (Lynch et al., 2006). In some cases, they are also known to act as repressors (Holland et al., 2007; Schnabel and Abate-Shen, 1996). The library included the homeodomains from 216 human genes, and 26% were repressor hits. The repressors were found in 4 out of the 11 subclasses of homeodomains: PRD, NKL, HOXL, and LIM (FIG. 13A). These recruitment assay results suggested that transcriptional repression could be a widespread, though not ubiquitous, function of homeodomain transcription factors.

[0168] Next, the HOXL subclass results were inspected more closely. This subclass contained the Hox genes, a subset of 39 homeodomain transcription factors that are master regulators of cell fate and specify regions of the body plan along the anterior-posterior axis during embryogenesis. These genes are found in four Hox paralog clusters (A to D) arranged co-linearly from 3′ to 5′ corresponding to the temporal order and spatial patterning of their expression along the anterior-posterior axis (Gilbert, 1971). Interestingly, the repressor strength of their homeodomains was also collinear with their arrangement in the Hox clusters, such that the more 5′ gene homeodomains were stronger repressors (Spearman's ρ=0.82, FIG. 13B). This correlation suggested a possible link between homeodomain repressor function and Hox gene expression timing and anterior-posterior axis spatial patterning.

[0169] Multiple sequence alignment of the Hox homeodomains revealed an RKKR (SEQ ID NO: 1330) motif present in the N-terminal arm of the 11 strongest repressor domains (FIG. 13C). The motif resided in a basic context in the strongest repressors, while the lower ranked domains lack the motif but still contained some basic residues in the disordered N-terminal arm, resulting in a significant correlation between repression strength and the number of positively charged amino acids arginine and lysine (R²=0.85, FIGS. 13C-13E).

[0170] Outside the Hox homeodomains, 99.5% of the repressor hits in the Pfam nuclear protein domain library did not contain the RKKR (SEQ ID NO: 1330) motif, while many non-hits did. Also, there was no correlation between net domain charge and repression strength at day 5 when considering the full library of domains (R²=0.04). Together, these results suggested the RKKR (SEQ ID NO: 1330) motif and charge contributed to Hox homeodomain repression in the recruitment assay, but they were not sufficient for repression when found in the context of other domains.

### Example 7

### Discovery of Transcriptional Activators by HT-Recruit to a Minimal Promoter

[0171] It was established that a reporter K562 line with a weak minimal CMV (min CMV) promoter that could be activated upon recruitment of fusions between rTetR and activation domains (FIG. 14A). To perform the activator screen, lentivirus was used to deliver the nuclear Pfam domain library to these reporter cells, rTetR-mediated recruitment was induced with doxycycline for 48 hours, the cells (FIG. 21A) were magnetically separated and the domains in the two resulting cell populations were sequenced. An enrichment ratio from the sequencing counts in the bead-bound (ON) and unbound (OFF) populations for each domain as a measure of transcriptional activation strength was computed and hits were two standard deviations past the mean of the poorly expressed negative controls (FIG. 14B). The hits included three previously known transcriptional activation domain families that were present in the library: FOXO-TAD from FOXO1/3/6, LMSTEN from Myb/Myb-A, and TORC_C from CRTC1/2/3. Activation strength measurements for the hits were highly reproducible between separately transduced biological replicates (r²=0.89, FIG. 14B). This second screen with the short nuclear domain library established that HT-recruit can be used to measure either activation or repression by changing the reporter's promoter. Amino acid and nucleic acid sequences for activators identified in the nuclear Pfam domain library are shown in Table 2, with lower scores indicated stronger activators.

[0172] In total, 48 hits from 26 domain families were found. Beyond the three known activator domain families above, the remaining families with an activator hit were not previously annotated on Pfam as activator domains (FIG. 14C). Overall, fewer activators were found than repressors, which may simply be because activators are often disordered or low-complexity regions (Liu et al., 2006) that are frequently not annotated as Pfam domains. However, the proteins containing activator domains were significantly enriched for gene ontology terms such as ‘positive regulation of transcription’ and the strongest enrichment was for ‘signaling’, which reflects that many of their source proteins are activating factors (FIG. 21B). Further, the hits were significantly more acidic than non-hits (p≤1e-5, Mann Whitney test, FIG. 14D), a common property in activation domains (Mitchell and Tjian, 1989; Staller et al., 2018).

[0173] Several hits were not sourced from sequence-specific transcription factors where classical activator domains are expected but were instead nonclassical activators from co-activator and transcriptional machinery proteins including Med9, TFIIEβ, and NCOA3. In particular, the Med9 domain, whose ortholog directly binds other mediator complex components in yeast (Takahashi et al., 2009), was a strong activator with an average log 2(OFF:ON)=−5.5, despite its weak expression level. Nonclassical activators have previously been reported to work individually in yeast (Gaudreau et al., 1999) but only weakly when individually recruited in mammalian cells (Nevado et al., 1999). One exception is TATA-binding protein (Dorris and Struhl, 2000). By screening more nonclassical sequences, more exceptions to this notion were found.

[0174] For all tested domains, doxycycline-dependent activation of the reporter gene was confirmed using both the extended 80 AA sequence from the library and the trimmed Pfam-annotated domain (FIG. 21C). The previously annotated FOXO-TAD and LMSTEN were strong activators, in both their extended and trimmed versions. The activator function of DUF3446 from the transcription factor EGR3 and the largely uncharacterized QLQ domain from the SWI/SNF family SMARCA2 protein was also confirmed. Further, it was confirmed that the Dpy-30 motif domain, a DUF found in the Dpy-30 protein, was a weak activator. Dpy-30 was a core subunit of histone methyltransferase complexes that write H3K4me3 (Hyun et al., 2017), a chromatin mark associated with transcriptionally active chromatin regions (Sims et al., 2003). In total, 11 hit domains (including nonclassical hits Med9 and Nuc_rec_co-act from NCOA3) were tested and all were found to significantly activate the reporter, when using the extended 80 AA sequence from the library. Together, the screen and validations demonstrated that the unbiased nuclear protein domain library can be productively re-screened to uncover domains with distinct functions, and that a diverse set of domains beyond classical activation domains (and including DUFs) can activate transcription upon recruitment.

### Example 8

### Discovery of KRAB Activator Domains

[0175] Surprisingly, the strongest activator in the library was the KRAB domain from ZNF473 (FIG. 5B). Three other KRAB domains (from ZFP28, ZNF496, and ZNF597) were also activator hits, all of which were stably expressed and not repressors. One of these domains, from ZNF496, had previously been reported as an activator when recruited individually in HT1080 cells (Losson and Nielsen, 2010). Interestingly, ZFP28 contains two KRAB domains; KRAB_1 was a repressor and KRAB_2 was an activator. Previous affinity-purification/mass-spectrometry performed on full-length ZFP28 identified significant interactions with both repressor and activator proteins (Schmitges et al., 2016). The activator KRAB domains were significantly more acidic than nonactivator KRABs (p=0.01, Mann Whitney test, FIG. 14D). Sequence analysis showed they were divergent from the consensus KRAB sequence while sharing homology to each other and formed a variant KRAB subcluster (FIG. 14E). Previous phylogenetic analysis has linked the variant KRAB cluster to a lack of KAP1 binding and older evolutionary age (Helleboid et al., 2019). More specifically, two of the activator KRAB source proteins (ZNF496 and ZNF597) had previously been tested with co-immunoprecipitation mass-spectrometry and were not found to interact with KAP1 (Helleboid et al., 2019).

[0176] It was individually validated that the KRAB from ZNF473 as a strong activator and KRAB_2 from ZFP28 as a moderate strength activator (FIG. 14F), using the same 80 AA sequence centered on the KRAB domains that was used in the library. Further, the trimmed 41 AA KRAB from ZNF473 was sufficient for strong activation, while the trimmed 37 AA KRAB_2 from ZFP28 did not activate, implying some of the surrounding sequence was required for activation (FIG. 21C). Next, available ChiP-seq and ChIP-exo datasets were inspected (ENCODE Project Consortium et al., 2020; Imbeault et al., 2017; Najafabadi et al., 2015; Schmitges et al., 2016) and it was found that ZNF473 co-localized with the active chromatin mark H3K27ac, in contrast to the repressive ZNF10 (FIG. 14G). Upon manual inspection, the most significant ZNF473 peaks were found near the transcription start site of genes (CASC3, STAT6, WASF2, ZKSCAN2) and a lncRNA (LINC00431). Meanwhile, ZFP28 did not co-localize with H3K27ac, perhaps indicating its KAP1-binding repressor KRAB_1 domain was generally the dominant effector over its moderate strength activator KRAB_2 domain. Looking beyond these individual KRAB proteins, the zinc finger proteins that contain a repressor KRAB did not co-localize with H3K27ac while the non-repressive KRAB proteins as a group did include colocalized peaks (FIG. 14G). Together, the results support that variant KRAB proteins are functionally diverse, sometimes functioning as transcriptional activators.

### Example 9

### Tiling Library Uncovers Effector Domains in Unannotated Regions of Nuclear Proteins

[0177] Pfam annotations provided one useful means of filtering the nuclear proteome to generate a relatively compact library, but Pfam is likely currently missing many of the human effector domains. In order to discover effector domains in unannotated regions of proteins, a tiling library was designed by curating a list of 238 proteins from silencer complexes and tiling their sequences with 80 amino acids separated by a 10 amino acid tiling window (FIG. 15A). High-throughput recruitment to the strong pEF reporter was performed and time points were taken after 5 days of doxycycline to measure silencing, and again at day 13 (8 days after doxycycline release) to measure epigenetic memory (FIG. 22A). 4.3% of the tiles scored as hits at day 5 (FIG. 15B) and their repressor strength measurements were reproducible (r²=0.72, FIG. 22B). Altogether, the tiling screen found short repressor domains in 141/238 proteins. Some of these hits include positive controls overlapping annotated domains: for example, by tiling ZNF57 and ZNF461, the KRAB domains of these transcription factors were identified as repressive effectors, and not the rest of the sequence (FIG. 22C). Similarly, the tiling strategy identified the RYBP repressive domain annotated by Pfam, and both the 80 AA tile and the 32 AA Pfam domain silenced with similar strength and epigenetic memory in individual validations (FIG. 22D). Repressors in REST (overlapping the CoREST binding domain (Ballas et al., 2001)), DNMT3b (overlapping the DNMT1 and DNMT3a binding domain (Kim et al., 2002)), and CBX7 (overlapping the PcBox that recruits PRC1 (Li et al., 2010)) were also identified and validated (FIGS. 22E-22G). Another category of tiling hits was not annotated as domains in Pfam, but previous reports were found of their repressor function in the literature. For example, amino acids 121-220 of CTCF had a strong repressive function in the screen and when validated individually (FIGS. 15C and 15E), consistent with previous recruitment studies in HeLa, HEK293, and COS-7 cells (Drueppel et al., 2004). Together, these results established that high-throughput recruitment of protein tiles was an effective strategy to identify bonafide repressor domains. Amino acid sequences for repressors identified in the tiling library are shown in Table 4, with higher scores indicating increased repression.

[0178] Novel unannotated repressor domains were also discovered. For example, BAZ2A (also known as TIP5) is a nuclear remodeling complex (NoRC) component that mediates transcriptional silencing of some rDNA (Guetg et al., 2010), but does not have any annotated effector domains. The BAZ2A tiling data showed a peak of repressor function in a glutamine-rich region and it was individually validated as a moderate strength repressor (FIGS. 15D and 15E). Repressor tiles were found in unannotated regions of three TET DNA demethylases (TET1/2/3). Unexpectedly, repressor tiles were also identified in the control protein DMD, which was validated by flow cytometry (FIG. 22H).

[0179] A MGA, which is thought to repress transcription by binding the genome at E-box motifs and recruiting the non-canonical polycomb 1.6 complex (Blackledge et al., 2014; Jolma et al., 2013; Stielow et al., 2018), tiling experiment revealed two domains with repressor function, located adjacent to the two known DNA binding domains, called here Repressor 1 and Repressor 2 (FIG. 15F). These repressor domains were individually validated and distinct dynamics of silencing and degrees of memory were observed; the first domain (amino acids 341-420) featured slow silencing but strong memory, while the second domain (amino acids 2381-2460), featured rapid silencing but weak memory with fast reactivation (FIG. 15G). These appear to be the first effector domains isolated from a protein in the ncPRC1.6 silencing complex.

[0180] Next, it was attempted to identify the minimal necessary sequence for repressor function in each independent domain by examining the overlap in all tiles covering a protein region that shows repressor function and determining which contiguous sequence of amino acids is present in all the repressive tiles (FIG. 15H). Using this approach, two candidate minimized effector domains for MGA were generated: the 10 amino acid sequence MGA[381-390] and the 30 amino acid sequence MGA[2431-2460], which both overlapped conserved regions with ConSurf-predicted functional exposed residues. Individual validation experiments demonstrated that both minimized candidates can efficiently silence the reporter (FIG. 15I).

### Materials and Methods

### Cell Lines and Cell Culture

[0181] All experiments were carried out in K562 cells (ATCC CCL-243). Cells were cultured in a controlled humidified incubator at 37° C. and 5% C02, in RPMI 1640 (Gibco) media supplemented with 10% FBS (Hyclone), penicillin (10,000 I.U./mL), streptomycin (10,000 μg/mL), and L-glutamine (2 mM). HEK293FT and HEK293T-LentiX cells were grown in DMEM (Gibco) media supplemented with 10% FBS (Hyclone), penicillin (10,000 I.U./mL), and streptomycin (10,000 μg/mL) and used to produce lentivirus. Reporter cell lines were generated by TALEN-mediated homology-directed repair to integrate a donor construct into the AAVS1 locus as follows: 1.2′10′ K562 cells were electroporated in Amaxa solution (Lonza Nucleofector 2b, setting TO-16) with 1000 ng of reporter donor plasmid, and 500 ng of each TALEN-L (Addgene #35431) and TALEN-R (Addgene #35432) plasmid (targeting upstream and downstream the intended DNA cleavage site, respectively). After 7 days, the cells were treated with 1000 ng/mL puromycin antibiotic for 5 days to select for a population where the donor was stably integrated in the intended locus, which provides a promoter to express the PuroR resistance gene. Fluorescent reporter expression was measured by microscopy and by flow cytometry (BD Accuri).

### Nuclear Protein Pfam Domain Library Design

[0182] The UniProt database (UniProt Consortium, 2015) was queried for human genes that can localize to the nucleus. Subcellular location information on UniProt was determined from publications or ‘by similarity’ in cases where there was only a publication on a similar gene (e.g., ortholog) and was manually reviewed. Pfam-annotated domains were then retrieved using the ProDy searchPfam function (Bakan et al., 2011). domains that were 80 amino acids or shorter were filtered for and the C2H2 Zinc finger DNA-binding domains, which are highly abundant, repetitive, were excluded and not expected to function as transcriptional effectors. The sequence of the annotated domain was retrieved and it was extended equally on either side to reach 80 amino acids total. Duplicate sequences were removed, then codon optimization was performed for human codon usage, removing BsmBI sites and constraining GC content to between 20% and 75% in every 50 nucleotide window (performed with DNA chisel (Zulkower and Rosser, 2020)). 499 random controls of 80 amino acids lacking stop codons were computationally generated as controls. 362 elements tiling the DMD protein in 80 amino acid tiles with a 10 amino acid sliding window were also included as controls because DMD was not thought to be a transcriptional regulator. In total, the library consists of 5,955 elements.

### Silencer Tiling Library Design

[0183] 216 proteins involved in transcriptional silencing were curated from a database of transcriptional regulators (Lambert et al., 2018). 32 proteins likely to be involved in transcriptional silencing were manually added and then an unbiased protein tiling library was generated. To do this, the canonical transcript for each gene was retrieved from the Ensembl BioMart (Kinsella et al., 2011) using the Python API. If no canonical transcript was found, the longest transcript with a CDS was retrieved. The coding sequences were divided into 80 amino acid tiles with a 10 amino acid sliding window between tiles. For each gene, a final tile was included, spanning from 80 amino acids upstream of the last residue to that last residue, such that the C-terminal region would be included in the library. Duplicate protein sequences were removed, and codon optimization was performed for human codon usage, removing BsmBI sites and constraining GC content to between 20% and 75% in every 50 nucleotide window (performed with DNA chisel (Zulkower and Rosser, 2020)). 361 DMD tiling negative controls were included, as in the previous library design, resulting in 15,737 library elements in total.

### KRAB Deep Mutational Scan Library Design

[0184] A deep mutational scan of ZNF10 KRAB domain sequence, as used in CRISPRi (Gilbert et al., 2014), was designed with all possible single substitutions and all consecutive double and triple substitutions of the same amino acid (e.g., substitution with AAA). These amino acid sequences were reverse translated into DNA sequences using a probabilistic codon optimization algorithm, such that each DNA sequence contains some variation beyond the substituted residues, which improves the ability to unambiguously align sequencing reads to unique library members. In addition, all Pfam-annotated KRAB domains from human KRAB genes found on InterPro were included, similarly as in the previous nuclear Pfam domain library. Tiling sequences, as designed in the previous tiling library, were also included for five KRAB Zinc Finger genes. 300 random control sequences and 200 tiles from the DMD gene were included as negative controls. During codon optimization, BsmBI sites were removed and GC content was constrained to be between 30%/o and 70% in every 80 nucleotide window (performed with DNA chisel (Zulkower and Rosser, 2020)). The total library size was 5,731 elements.

### Domain Library Cloning

[0185] Oligonucleotides with lengths up to 300 nucleotides were synthesized as pooled libraries (Twist Biosciences) and then PCR amplified. 6×50 ul reactions were set up in a clean PCR hood to avoid amplifying contaminating DNA. For each reaction, 5 ng of template, 0.1 μl of each 100 μM primer, 1 μl of Herculase II polymerase (Agilent), 1 μl of DMSO, 1 μl of 10 nM dNTPs, and 10 μl of 5× Herculase buffer was used. The thermocycling protocol was 3 minutes at 98° C., then cycles of 98° C. for 20 seconds, 61° C. for 20 seconds, 72° C. for 30 seconds, and then a final step of 72° C. for 3 minutes. The default cycle number was 29×, and this was optimized for each library to find the lowest cycle that resulted in a clean visible product for gel extraction (in practice, 25 cycles was the minimum). After PCR, the resulting dsDNA libraries were gel extracted by loading ≥4 lanes of a 2% TBE gel, excising the band at the expected length (around 300 bp), and using a QIAgen gel extraction kit. The libraries were cloned into a lentiviral recruitment vector pJT050 with 4×10 μl GoldenGate reactions (75 ng of pre-digested and gel-extracted backbone plasmid, 5 ng of library, 0.13 μl of T4 DNA ligase (NEB, 20000 U/μl), 0.75 μl of Esp3I-HF (NEB), and 1 μl of 10×T4 DNA ligase buffer) with 30 cycles of digestion at 37° C. and ligation at 16° C. for 5 minutes each, followed by a final 5 minute digestion at 37° C. and then 20 minutes of heat inactivation at 70° C. The reactions were then pooled and purified with MinElute columns (QIAgen), eluting in 6 ul of ddH2O. 2 μl per tube was transformed into two tubes of 50 s0 of electrocompetent cells (Lucigen DUO) following the manufacturer's instructions. After recovery, the cells were plated on 3-7 large 10″×10″ LB plates with carbenicillin. After overnight growth at 37° C., the bacterial colonies were scraped into a collection bottle and plasmid pools were extracted with a HiSpeed Plasmid Maxiprep kit (QIAgen). 2-3 small plates were prepared in parallel with diluted transformed cells in order to count colonies and confirm the transformation efficiency was sufficient to maintain at least 30× library coverage. To determine the quality of the libraries, the domains were amplified from the plasmid pool and from the original oligo pool by PCR with primers with extensions that include Illumina adapters and sequenced. The PCR and sequencing protocol were the same as described below for sequencing from genomic DNA, except these PCRs use 10 ng of input DNA and 17 cycles. These sequencing datasets were analyzed as described below to determine the uniformity of coverage and synthesis quality of the libraries. In addition, 20-30 colonies from the transformations were Sanger sequenced (Quintara) to estimate the cloning efficiency and the proportion of empty backbone plasmids in the pools.

### High-Throughput Recruitment to Measure Repressor Activity

[0186] Large scale lentivirus production and spinfection of K562 cells were performed. To generate sufficient lentivirus to infect the libraries into K562 cells, HEK293T cells were plated on four 15-cm tissue culture plates. On each plate, 9×105 HEK293T cells were plated in 30 mL of DMEM, grown overnight, and then transfected with 8 μg of an equimolar mixture of the three third-generation packaging plasmids and 8 μg of rTetR-domain library vectors using 50 s0 of polyethylenimine (PEI, Polysciences #23966). After 48 hours and 72 hours of incubation, lentivirus was harvested. The pooled lentivirus was filtered through a 0.45-μm PVDF filter (Millipore) to remove any cellular debris. For the nuclear Pfam domain repressor screen, 4.5×10⁷ K562 reporter cells were infected with the lentiviral library by spinfection for 2 hours, with two separate biological replicates of the infection. Infected cells grew for 3 days and then the cells were selected with blasticidin (10 μg/mL, Sigma). Infection and selection efficiency were monitored each day using flow cytometry to measure mCherry (BD Accuri C6). Cells were maintained in spinner flasks in log growth conditions each day by diluting cell concentrations back to a 5×10⁵ cells/mL, with at least 1.5×10⁷ cells total remaining per replicate such that the lowest maintenance coverage was >25,000× cells per library element (a very high coverage level that compensates for losses from incomplete blasticidin selection, library preparation, and library synthesis errors). On day 6 post-infection, recruitment was induced by treating the cells with 1000 ng/ml doxycycline (Fisher Scientific) for 5 days, then cells were spun down out of doxycycline and blasticidin and maintained in untreated RPMI media for 8 more days, up to Day 13 counting from the addition of doxycycline. 2.5×10⁸ cells were taken for measurements at each timepoint (days 5, 9, and 13). The protocol was similar for the KRAB DMS, but doxycycline was added on day 8 post-infection, >12,500× coverage, and 2×10⁸−2.2×10⁸ cells were taken for each timepoint. The protocol was similar for the tiling screen, but 9.6×10⁷ cells were infected, doxycycline was added on day 8 post-infection, at least 2×10⁷ cells were maintained at each passage for >12,500× coverage, and 2×10⁸-2.7×10⁸ cells were taken for each timepoint.

### High-Throughput Recruitment to Measure Transcriptional Activation Activity

[0187] For the nuclear Pfam domain activator screen, lentivirus for the nuclear Pfam library in the rTetR(SE-G72P)-3×FLAG vector was generated as for the repressor screen, and 3.8×10⁷ K562-pDY32 minCMV reporter cells were infected with the lentiviral library by spinfection for 2 hours, with two separate biological replicates of the infection. Infected cells grew for 2 days and then the cells were selected with blasticidin (10 μg/mL, Sigma). Infection and selection efficiency were monitored each day using flow cytometry to measure mCherry (BD Accuri C6). Cells were maintained in spinner flasks in log growth conditions each day by diluting cell concentrations back to a 5×10⁵ cells/mL, with at least 1×10⁸ total cells remaining per replicate such that the lowest maintenance coverage was >18,000× cells per library element. On day 7 post-infection, recruitment was induced by treating the cells with 1000 ng/ml doxycycline (Fisher Scientific) for 2 days, then cells were spun down out of doxycycline and blasticidin and maintained in untreated RPMI media for 4 more days. 2×10⁸ cells were taken for measurements at the day 2 time point. There was no evidence of activation memory at day 4 post-doxycycline removal, as determined by the absence of citrine positive cells by flow cytometry, so no additional time points were collected.

### Magnetic Separation of Reporter Cells

[0188] At each timepoint, cells were spun down at 300×g for 5 minutes and media was aspirated. Cells were then resuspended in the same volume of PBS (Gibco) and the spin down and aspiration was repeated, to wash the cells and remove any IgG from serum. Dynabeads™ M-280 Protein G (ThermoFisher 10003D) were resuspended by vortexing for 30 seconds. 50 mL of blocking buffer was prepared per 2×10⁸ cells by adding 1 gram of biotin-free BSA (Sigma Aldrich) and 200 μl of 0.5 M pH 8.0 EDTA (ThemoFisher 15575020) into DPBS (Gibco), vacuum filtering with a 0.22-μm filter (Millipore), and then kept on ice. 60 μl of beads was prepared for every 1×10⁷ cells, by adding 1 mL of buffer per 200 μl of beads, vortexing for 5 seconds, placing on a magnetic tube rack (Eppendorf), waiting one minute, removing supernatant, and finally removing the beads from the magnet and resuspending in 100-600 μl of blocking buffer per initial 60 μl of beads. For the KRAB DMS only, 30 μl of beads was prepared for every 1×10⁷ cells, in the same way. Beads were added to cells at no more than 1×10⁷ cells per 100 μl of resuspended beads, and then incubated at room temperature while rocking for 30 minutes. For a sample with 2×10⁸ cells, 1.2 mL of beads were used, resuspended in 12 mL of blocking buffer, in a 15 mL Falcon tube and a large magnetic rack. For a sample with <5×10⁷ cells, non-stick Ambion 1.5 mL tubes and a small magnetic rack were used. After incubation, the bead and cell mixture were placed on the magnetic rack for >2 minutes. The unbound supernatant was transferred to a new tube, placed on the magnet again for >2 minutes to remove any remaining beads, and then the supernatant was transferred and saved as the unbound fraction. Then, the beads were resuspended in the same volume of blocking buffer, magnetically separated again, the supernatant was discarded, and the tube with the beads was kept as the bound fraction. The bound fraction was resuspended in blocking buffer or PBS to dilute the cells (the unbound fraction is already dilute). Flow cytometry (BD Accuri) was performed using a small portion of each fraction to estimate the number of cells in each fraction (to ensure library coverage was maintained) and to confirm separation based on citrine reporter levels (the bound fraction should be >90% citrine positive, while the unbound fraction is more variable depending on the initial distribution of reporter levels). Finally, the samples were spun down and the pellets were frozen at −20° C. until genomic DNA extraction.

### High-Throughput Measurement of Domain Fusion Protein Expression Level

[0189] The expression level measurements were made in K562-pDY32 cells (with citrine OFF) infected with the 3×FLAG-tagged nuclear Pfam domain library. 1×10⁸ cells per biological replicate were used after 5 days of blasticidin selection (10 μg/mL, Sigma), which was 7 days post-infection. 1×10⁶ control K562-JT039 cells (citrine ON, no lentiviral infection) were spiked into each replicate. Fix Buffer I (BD Biosciences, BDB557870) was preheated to 37° C. for 15 minutes and Permeabilization Buffer Ill (BD Biosciences, BDB558050) and PBS (Gibco) with 10% FBS (Hyclone) were chilled on ice. The library of cells expressing domains was collected and cell density was counted by flow cytometry (BD Accuri). To fix, cells were resuspended in a volume of Fix Buffer I (BD Biosciences, BDB557870) corresponding to pellet volume, with 20 μl per 1 million cells, at 37° C. for 10-15 minutes. Cells were washed with 1 mL of cold PBS containing 10% FBS, spun down at 500×g for 5 minutes and then supernatant was aspirated. Cells were permeabilized for 30 minutes on ice using cold BD Permeabilization Buffer Ill (BD Biosciences, BDB558050), with 20 μl per 1 million cells, which was added slowly and mixed by vortexing. Cells were then washed twice in 1 ml PBS+10% FBS, as before, and then supernatant was aspirated. Antibody staining was performed for 1 hour at room temperature, protected from light, using 5 μl/1×10⁶ cells of α-FLAG-Alexa647 (RNDsystems, IC8529R). The cells were washed and resuspended at a concentration of 3×10⁷ cells/ml in PBS+10% % FBS. Cells were sorted into two bins based on the level of APC-A fluorescence (Sony SH800S) after gating for mCherry positive viable cells. A small number of unstained control cells was also analyzed on the sorter to confirm staining was above background. The spike-in citrine positive cells were used to assess the background level of staining in cells known to lack the 3×FLAG tag, and the gate for sorting was drawn above that level. After sorting, the cellular coverage ranged from 336-1,295 cells per library element across samples. The sorted cells were spun down at 500×g for 5 minutes and then resuspended in PBS. Genomic DNA extraction was performed following the manufacturer's instructions (QIAgen Blood Maxi kit was used for samples with >1×107 cells, and QIAamp DNA Mini kit with one column per up to 5×10⁶ cells was used for samples with ≤1×10⁷ cells) with one modification: the Proteinase K+AL buffer incubation was performed overnight at 56° C.

### Library Preparation and Sequencing

[0190] Genomic DNA was extracted using a Blood & Tissue kit (QIAgen) following the manufacturer's instructions with up to 1.25×10⁸ cells per column. DNA was eluted in EB and not AE to avoid subsequence PCR inhibition. The domain sequences were amplified by PCR with primers containing Illumina adapters as extensions. A test PCR was performed using 5 μg of genomic DNA in a 50 μl (half-size) reaction to verify if the PCR conditions would result in a visible band at the expected size for each sample. Then, 12-24×100 μl reactions were set up on ice (in a clean PCR hood to avoid amplifying contaminating DNA), with the number of reactions depending on the amount of genomic DNA available in each experiment. 10 μg of genomic DNA, 0.5 μl of each 100 μM primer, and 50 μl of NEBnext 2× Master Mix (NEB) was used in each reaction. The thermocycling protocol was to preheat the thermocycler to 98° C., then add samples for 3 minutes at 98° C., then 32× cycles of 98° C. for 10 seconds, 63° C. for 30 seconds, 72° C. for 30 seconds, and then a final step of 72° C. for 2 minutes. All subsequent steps were performed outside the PCR hood. The PCR reactions were pooled and ≥140 μl were run on at least three lanes of a 2% TBE gel alongside a 100-bp ladder for at least one hour, the library band around 395 bp was cut out, and DNA was purified using the QIAquick Gel Extraction kit (QIAgen) with a 30 ul elution into non-stick tubes (Ambion). A confirmatory gel was run to verify that small products were removed. These libraries were then quantified with a Qubit HS kit (Thermo Fisher), pooled with 15% PhiX control (Illumina), and sequenced on an Illumina NextSeq with a High output kit using a single end forward read (266 or 300 cycles) and 8 cycle index reads.

### Domain Sequencing Analysis

[0191] Sequencing reads were demultiplexed using bcl2fastq (Illumina). A Bowtie reference was generated using the designed library sequences with the script ‘makeIndices.py’ and reads were aligned with 0 mismatch allowance using the script ‘makeCounts.py’. The enrichments for each domain between OFF and ON (or FLAGhigh and FLAGlow) samples were computed using the script ‘makeRhos.py’. Domains with <5 reads in both samples for a given replicate were dropped from that replicate (assigned 0 counts), whereas domains with <5 reads in one sample would have those reads adjusted to 5 in order to avoid the inflation of enrichment values from low depth. For all of the nuclear domain screens, domains with ≤5 counts in both replicates of a given condition were filtered out of downstream analysis. For the nuclear domain expression screen, well-expressed domains were those with a log 2(FLAGhigh:FLAGlow)≥1 standard deviation above the median of the random controls. For the nuclear Pfam domain repressor screen, hits were domains with log 2(OFF:ON)≥2 standard deviations above the mean of the poorly expressed domains. For the nuclear domain activator screen, hits were domains with log 2(OFF:ON)≤2 standard deviations below the mean of the poorly expressed domains. For the silencer tiling screen, tiles with ≤20 counts in both replicates of a given condition were filtered out and hits were tiles with log 2(OFF:ON)≥2 standard deviations above the mean of the random and DMD tiling controls. Gene ontology analysis enrichments were computed using the PantherDB web tool (www.pantherdb.org). The background sets were all proteins containing domains that were well-expressed and measured in the experiment after count filters were applied. P-values for statistical significance were calculated using Fisher's exact test, the False Discovery Rate (FDR) was computed, and only the most significant results, all with FDR<10%, were shown.

### Western Blot and Co-Immunoprecipitation

[0192] Cells transduced with a lentiviral vector containing an rTetR-fusion-T2A-mCherry-BSD were selected with blasticidin (10 μg/mL) were selected until mCherry was >80%. Cells were lysed in lysis buffer (1% Triton X-100, 150 mM NaCl, 50 mM Tris pH 7.5, 1 mM EDTA, Protease inhibitor cocktail). Protein amounts were quantified using the DC Protein Assay kit (Bio-Rad). Equal amounts were loaded onto a gel and transferred to a nitrocellulose or PVDF membrane. Membrane was probed using GATA1 antibody (1:1000, rabbit, Cell Signaling Technologies cat no. 3535S) and GAPDH antibody (1:2000, mouse, ThermoFisher cat no. AM4300) or FLAG M2 monoclonal antibody (1:1000, mouse, Sigma-Aldrich, catalog number F1804) and Histone 3 antibody (1:1000, mouse, Abcam cat no. AB1791) as primary antibodies. Donkey anti-rabbit IRDye 680 LT and goat anti-mouse IRDye 800CW (1:20,000 dilution, LI-COR Biosciences, cat nos. 926-68023 and 926-32210, respectively) or Goat anti-mouse IRDye 680 RD and goat anti-rabbit IRDye 800CW (1:20,000 dilution, LI-COR Biosciences, cat nos. 926-68070 and 926-32211, respectively) were used as secondary antibodies, respectively

[0193] Blots were imaged on a LiCor Odyssey CLx. Band intensities were quantified using ImageJ.

### Individual Repressor Recruitment Assays

[0194] Individual effector domains were cloned as fusions with rTetR or rTetR(SE-G72P) with or without a 3×FLAG tag (see figure legends), upstream of a T2A-mCherry-BSD marker using GoldenGate cloning into backbones pJT050 or pJT126. K562-pJT039-pEF-citrine reporter cells were then transduced with this lentiviral vector and, 3 days later, selected with blasticidin (10 μg/mL) until >80% of the cells were mCherry positive (6-7 days). Cells were split into separate wells of a 24-well plate and either treated with doxycycline (Fisher Scientific) or left untreated. After 5 days of treatment, doxycycline was removed by spinning down the cells, replacing media with DPBS (Gibco) to dilute any remaining doxycycline, and then spinning down the cells again and transferring them to fresh media. Timepoints were measured every 2-3 days by flow cytometry analysis of >7,000 cells (either a BD Accuri C6 or Beckman Coulter CytoFLEX). Data was analyzed using Cytoflow and custom Python scripts. Events were gated for viability and for mCherry as a delivery marker. To compute a fraction of OFF cells during doxycycline treatment, a 2 component Gaussian mixture model was fitted to the untreated rTetR-only negative control cells which fits both the ON peak and the subpopulation of background-silenced OFF cells, and then set a threshold that was 2 standard deviations below the mean of the ON peak in order to label cells that have silenced as OFF. Using the time-matched untreated control, the background normalized percentage of cells was calculated Cells_{OFF,normalized}=Cells_{OFF,+dox}/(1−Cells_{OFF,untreated}). Two independently transduced biological replicates were used. A gene silencing model, consisting of the increasing form of the exponential decay (e.g., exponential decay subtracted from 1) during the doxycycline treatment phase and an exponential decay during the doxycycline removal phase with additional parameters for lag times before silencing and reactivation initiate, was fit to the normalized data using SciPy.

### Individual Activator Recruitment Assays

[0195] Domains were cloned as a fusion with rTetR(SE-G72P) upstream of a T2A-mCherry-BSD marker, using GoldenGate cloning in the backbone pJT126. K562 pDY32 minCMV citrine reporter cells were then transduced with each lentiviral vector and, 3 days later, selected with blasticidin (10 μg/mL) until >80% of the cells were mCherry positive (6-7 days). Cells were split into separate wells of a 24-well plate and either treated with doxycycline or left untreated. Timepoints were measured by flow cytometry analysis of >15,000 cells (Biorad ZE5). To compute a fraction of ON cells during doxycycline treatment, a Gaussian model was fitted to the untreated rTetR-only negative control cells which fits the OFF peak, and then set a threshold that was 2 standard deviations above the mean of the OFF peak in order to label cells that have activated as ON. Two independently transduced biological replicates were used.

### Flow Cytometry for FLAG-Tagged Protein Levels

[0196] Staining of FLAG-tagged fusion protein levels was performed. Specifically, K562 cells were transduced with lentivirus to express the fusion proteins, selected with blasticidin, and then were fixed with Fix Buffer I (BD Biosciences) for 15 minutes at 37° C. Cells were washed with cold PBS with 10% FBS once and then permeabilized on ice for 30 min using Perm Buffer III (BD Biosciences). Cells were washed twice and then stained with anti-FLAG (XX) for 1 hour at 4° C. After a final round of washing, flow cytometry was performed using a CytoFLEX (Beckman Coulter) flow cytometer. The data was analyzed with CytoFlow by gating the cells on mCherry expression and then plot the FLAG-tagged protein level in mCherry+ and non-transduced cells. This approach controls for variability in staining efficiency as the two cell groups are mixed within the same sample.

### Phylogenetic and Alignment Analyses

[0197] KRAB and homeodomain sequences were retrieved from Pfam and extended, using surrounding native sequence, to reach 80 AA. Well-expressed domains were selected for alignment. Phylogenetic trees and sequence alignments were obtained using the alignment website Clustal Omega using default parameters (McWilliam et al., 2013; Sievers et al., 2011), and the 52 phylogenetic neighbor-joining tree without distance corrections was built with default parameters in Jalview (Waterhouse et al., 2009). Alignment visualization was performed in Jalview.

### Analysis of Amino Acid Residue Conservation

[0198] Protein sequences were submitted to the ConSurf webserver and analyzed using the ConSeq method. Briefly, ConSeq selects up to 150 homologs for a multiple string alignment, by sampling from the list of homologs with 35-95% sequence identity. Then, a phylogenetic tree is re-constructed and conservation is scored using Rate4Site. ConSurf provides normalized scores, so that the average score for all residues is zero, and the standard deviation is one. The conservation scores calculated by ConSurf are a relative measure of evolutionary conservation at each residue in the protein and the lowest score represents the most conserved position in the protein. The uniqueness of the ZNF10 KRAB N-terminal extension was determined by protein BLAST to all human proteins and searching for other zinc finger protein among the BLAST matches (Johnson et al., 2008).

### ChIP-Seq and ChIP-Exo Analysis

[0199] External ChIP datasets were retrieved from multiple sources. ENCODE ChIP-seq data was processed with the uniform processing pipeline of ENCODE (ENCODE Project Consortium et al., 2020), and narrow peaks below IDR threshold 0.05 were retrieved. KRAB ZNF ChIP-exo data from tagged KRAB ZNF overexpression in HEK293 cells and KAP1 ChIP-exo data from H1 hESCs was obtained from GEO accession GSE78099 (Imbeault et al., 2017). Reads were trimmed to a uniform length of 36 basepairs and mapped to the hg38 version of the human genome using Bowtie (version 1.0.1; (Langmead et al., 2009)), allowing for up to 2 mismatches and only retaining unique alignments. Peak were called using MACS2 (version 2.1.0) (Feng et al., 2012) with the following settings: “-g hs -f BAM --keep-dup all -shift -75 --extsize 150 -- nomodel”. Browser tracks were generated using Python scripts. For some KRAB ZNFs where ChIP-exo data was not available, ChIP-seq data from tagged KRAB ZNF overexpression in HEK293 cells was obtained from GEO accessions GSE76496 (Schmitges et al., 2016) and GSE52523 (Najafabadi et al., 2015). KRAB ZNF peaks were defined as solo binding sites if no other KRAB ZNF in the dataset had a peak less than 250 basepairs away. ENCODE H3K27ac ChIP-seq datasets for H1 cells were processed with the ENCODE pipeline (ENCODE Project Consortium et al., 2020), narrow peaks were called with MACS2, and peaks below IDR threshold 0.05 were retrieved.

### External Datasets

[0200] ChIP-seq and ChIP-exo data for KRAB ZNF, KAP1, and H3K27ac (ENCODE Project Consortium et al., 2020; Imbeault et al., 2017; Najafabadi et al., 2015; Schmitges et al., 2016), KRAB ZNF gene evolutionary age (Imbeault et al., 2017), KRAB ZNF protein co-immunoprecipitation/mass spectrometry data (Helleboid et al., 2019), and CAT assays for KRAB repressor activity (Margolin et al., 1994: Witzgall et al., 1994) were retrieved from previously published studies.

[0201] All references, including publications, patent applications, and patents, cited herein are hereby incorporated by reference to the same extent as if each reference were individually and specifically indicated to be incorporated by reference and were set forth in its entirety herein.

[0202] Preferred embodiments of this invention are described herein, including the best mode known to the inventors for carrying out the invention. Variations of those preferred embodiments may become apparent to those of ordinary skill in the art upon reading the foregoing description. The inventors expect skilled artisans to employ such variations as appropriate, and the inventors intend for the invention to be practiced otherwise than as specifically described herein. Accordingly, this invention includes all modifications and equivalents of the subject matter recited in the claims appended hereto as permitted by applicable law. Moreover, any combination of the above-described elements in all possible variations thereof is encompassed by the invention unless otherwise indicated herein or otherwise clearly contradicted by context.

TABLE 1
Pfam Repressors

| | | | | Avg |
|---|---|---|---|---|
| | Pfam Domain | Extended Domain | Extended Domain | Repr |
| Gene | sequence | sequence | DNA sequence | D5 |
| ZFP28 | LVTFGDVAVDFSQEEWEWLN | NKKLEAVGTGIEPKAMSQGL | AACAAGAAGCTGGAGGCCGT | 7.89762464 |
| | PIQRNLYRKVMLENYRNLAS | VTFGDVAVDFSQEEWEWLNP | GGGCACCGGCATCGAGCCCA | |
| | L (SEQ ID NO: 1) | IQRNLYRKVMLENYRNLASL | AGGCCATGAGCCAGGGCCTG | |
| | | GLCVSKPDVISSLEQGKEPW | GTGACCTTCGGCGACGTGGC | |
| | | (SEQ ID NO: 2) | CGTGGACTTCAGCCAGGAGG | |
| | | | AGTGGGAGTGGCTGAACCCC | |
| | | | ATCCAGAGAAACCTGTACAG | |
| | | | AAAGGTGATGCTGGAGAACT | |
| | | | ACAGAAACCTGGCCAGCCTG | |
| | | | GGCCTGTGCGTGAGCAAGCC | |
| | | | CGACGTGATCAGCAGCCTGG | |
| | | | AGCAGGGCAAGGAGCCCTGG | |
| | | | (SEQ ID NO: 1177) | |
| ZN334 | PVSFQDLTVNFTQEEWQQLD | KMKKFQIPVSFQDLTVNFTQ | AAGATGAAGAAGTTCCAGAT | 7.84632686 |
| | PAQRLLYRDVMLENYSNLVS | EEWQQLDPAQRLLYRDVMLE | CCCCGTGAGCTTCCAGGACC | |
| | V (SEQ ID NO: 3) | NYSNLVSVGYHVSKPDVIFK | TGACCGTGAACTTCACCCAG | |
| | | LEQGEEPWIVEEFSNQNYPD | GAGGAGTGGCAGCAGCTGGA | |
| | | (SEQ ID NO: 4) | CCCCGCCCAGAGACTGCTGT | |
| | | | ACAGAGATGTGATGCTGGAG | |
| | | | AACTACAGCAACCTGGTGAG | |
| | | | CGTGGGCTACCACGTGAGCA | |
| | | | AGCCCGACGTGATCTTCAAG | |
| | | | CTGGAGCAGGGCGAGGAGCC | |
| | | | CTGGATCGTGGAGGAGTTCA | |
| | | | GCAACCAGAACTACCCCGAC | |
| | | | (SEQ ID NO: 897) | |
| ZN568 | TVTFKDVAVDLTQEEWEQMK | CSQESALSEEEEDTTRPLET | TGCAGCCAGGAGAGCGCCCT | 7.83993427 |
| | PAQRNLYRDVMLENYSNLVT | VTFKDVAVDLTQEEWEQMKP | GAGCGAGGAGGAGGAGGACA | |
| | V (SEQ ID NO: 5) | AQRNLYRDVMLENYSNLVTV | CCACCAGACCCCTGGAGACC | |
| | | GCQVTKPDVIFKLEQEEEPW | GTGACCTTCAAGGACGTGGC | |
| | | (SEQ ID NO: 6) | CGTGGACCTGACCCAGGAGG | |
| | | | AGTGGGAGCAGATGAAGCCC | |
| | | | GCCCAGAGAAACCTGTACAG | |
| | | | AGATGTGATGCTGGAGAACT | |
| | | | ACAGCAACCTGGTGACCGTG | |
| | | | GGCTGCCAGGTGACCAAGCC | |
| | | | CGACGTGATCTTCAAGCTGG | |
| | | | AGCAGGAGGAGGAGCCCTGG | |
| | | | (SEQ ID NO: 898) | |
| ZN37A | SVSFRDVTVGFTQEEWQHLD | ITSQGSVSFRDVTVGFTQEE | ATCACCAGCCAGGGCAGCGT | 7.81563526 |
| | PAQRTLYRDVMLENYSHLVS | WQHLDPAQRTLYRDVMLENY | GAGCTTCAGAGATGTGACCG | |
| | V (SEQ ID NO: 7) | SHLVSVGYCIPKPEVILKLE | TGGGCTTCACCCAGGAGGAG | |
| | | KGEEPWILEEKFPSQSHLEL | TGGCAGCACCTGGACCCCGC | |
| | | (SEQ ID NO: 8) | CCAGAGAACCCTGTACAGAG | |
| | | | ATGTGATGCTGGAGAACTAC | |
| | | | AGCCACCTGGTGAGCGTGGG | |
| | | | CTACTGCATCCCCAAGCCCG | |
| | | | AGGTGATCCTGAAGCTGGAG | |
| | | | AAGGGCGAGGAGCCCTGGAT | |
| | | | CCTGGAGGAGAAGTTCCCCA | |
| | | | GCCAGAGCCACCTGGAGCTG | |
| | | | (SEQ ID NO: 899) | |
| ZN181 | QVTFNDVAIDFTHEEWGWLS | PQVTFNDVAIDFTHEEWGWL | CCCCAGGTGACCTTCAACGA | 7.80113461 |
| | SAQRDLYKDVMVQNYENLVS | SSAQRDLYKDVMVQNYENLV | CGTGGCCATCGACTTCACCC | |
| | (SEQ ID NO: 9) | SVAGLSVTKPYVITLLEDGK | ACGAGGAGTGGGGCTGGCTG | |
| | | EPWMMEKKLSKGMIPDWESR | AGCAGCGCCCAGAGAGACCT | |
| | | (SEQ ID NO: 10) | GTACAAGGACGTGATGGTGC | |
| | | | AGAACTACGAGAACCTGGTG | |
| | | | AGCGTGGCCGGCCTGAGCGT | |
| | | | GACCAAGCCCTACGTGATCA | |
| | | | CCCTGCTGGAGGACGGCAAG | |
| | | | GAGCCCTGGATGATGGAGAA | |
| | | | GAAGCTGAGCAAGGGCATGA | |
| | | | TCCCCGACTGGGAGAGCAGA | |
| | | | (SEQ ID NO: 900) | |
| ZN510 | SVSFKDVTIEFTQEEWQQMA | PLRFSTLFQEQQKMNISQAS | CCCCTGAGATTCAGCACCCT | 7.65619264 |
| | PVQKNLYRDVMLENYSNLVS | VSFKDVTIEFTQEEWQQMAP | GTTCCAGGAGCAGCAGAAGA | |
| | V (SEQ ID NO: 11) | VQKNLYRDVMLENYSNLVSV | TGAACATCAGCCAGGCCAGC | |
| | | GYCCFKPEVIFKLEQGEEPW | GTGAGCTTCAAGGACGTGAC | |
| | | (SEQ ID NO: 12) | CATCGAGTTCACCCAGGAGG | |
| | | | AGTGGCAGCAGATGGCCCCC | |
| | | | GTGCAGAAGAACCTGTACAG | |
| | | | AGATGTGATGCTGGAGAACT | |
| | | | ACAGCAACCTGGTGAGCGTG | |
| | | | GGCTACTGCTGCTTCAAGCC | |
| | | | CGAGGTGATCTTCAAGCTGG | |
| | | | AGCAGGGCGAGGAGCCCTGG | |
| | | | (SEQ ID NO: 901) | |
| ZN862 | PVVFEDVAVYFTREEWGMLD | QDPSAEGLSEEVPVVFEELP | CAGGACCCCAGCGCCGAGGG | 7.64282609 |
| | KRQKELYRDVMRMNYELLAS | VVFEDVAVYFTREEWGMLDK | CCTGAGCGAGGAGGTGCCCG | |
| | L (SEQ ID NO: 13) | RQKELYRDVMRMNYELLASL | TGGTGTTCGAGGAGCTGCCC | |
| | | GPAAAKPDLISKLERRAAPW | GTGGTGTTCGAGGACGTGGC | |
| | | (SEQ ID NO: 14) | CGTGTACTTCACCAGAGAGG | |
| | | | AGTGGGGCATGCTGGACAAG | |
| | | | AGACAGAAGGAGCTGTACAG | |
| | | | AGATGTGATGAGAATGAACT | |
| | | | ACGAGCTGCTGGCCAGCCTG | |
| | | | GGCCCCGCCGCCGCCAAGCC | |
| | | | TGACCTGATCAGCAAGCTGG | |
| | | | AGAGAAGAGCCGCCCCCTGG | |
| | | | (SEQ ID NO: 902) | |
| ZN140 | SVTFRDVAIDFSQEEWKWLQ | SQGSVTFRDVAIDFSQEEWK | AGCCAGGGCAGCGTGACCTT | 7.59939471 |
| | PAQRDLYRCVMLENYGHLVS | WLQPAQRDLYRCVMLENYGH | CAGAGATGTGGCCATCGACT | |
| | L (SEQ ID NO: 15) | LVSLGLSISKPDVVSLLEQG | TCAGCCAGGAGGAGTGGAAG | |
| | | KEPWLGKREVKRDLFSVSES | TGGCTGCAGCCCGCCCAGAG | |
| | | (SEQ ID NO: 16) | AGACCTGTACAGATGCGTGA | |
| | | | TGCTGGAGAACTACGGCCAC | |
| | | | CTGGTGAGCCTGGGCCTGAG | |
| | | | CATCAGCAAGCCCGACGTGG | |
| | | | TGAGCCTGCTGGAGCAGGGC | |
| | | | AAGGAGCCCTGGCTGGGCAA | |
| | | | GAGAGAGGTGAAGAGAGACC | |
| | | | TGTTCAGCGTGAGCGAGAGC | |
| | | | (SEQ ID NO: 903) | |
| ZN208 | SLTFRDVAIEFSLEEWQCLD | GSLTFRDVAIEFSLEEWQCL | GGCAGCCTGACCTTCAGAGA | 7.57602814 |
| | TAQQNLYRNVMLENYRNLVF | DTAQQNLYRNVMLENYRNLV | TGTGGCCATCGAGTTCAGCC | |
| | L (SEQ ID NO: 17) | FLGIAAFKPDLIIFLEEGKE | TGGAGGAGTGGCAGTGCCTG | |
| | | SWNMKRHEMVEESPVICSHF | GACACCGCCCAGCAGAACCT | |
| | | (SEQ ID NO: 18) | GTACAGAAACGTGATGCTGG | |
| | | | AGAACTACAGAAACCTGGTG | |
| | | | TTCCTGGGCATCGCCGCCTT | |
| | | | CAAGCCCGACCTGATCATCT | |
| | | | TCCTGGAGGAGGGCAAGGAG | |
| | | | AGCTGGAACATGAAGAGACA | |
| | | | CGAGATGGTGGAGGAGAGCC | |
| | | | CCGTGATCTGCAGCCACTTC | |
| | | | (SEQ ID NO: 904) | |
| ZN248 | QVSFKDVCVDFTQEEWYLLD | NKSQEQVSFKDVCVDFTQEE | AACAAGAGCCAGGAGCAGGT | 7.53353306 |
| | PAQKILYRDVILENYSNLVS | WYLLDPAQKILYRDVILENY | GAGCTTCAAGGACGTGTGCG | |
| | V (SEQ ID NO: 19) | SNLVSVGYCITKPEVIFKIE | TGGACTTCACCCAGGAGGAG | |
| | | QGEEPWILEKGFPSQCHPER | TGGTACCTGCTGGACCCCGC | |
| | | (SEQ ID NO: 20) | CCAGAAGATCCTGTACAGAG | |
| | | | ATGTGATCCTGGAGAACTAC | |
| | | | AGCAACCTGGTGAGCGTGGG | |
| | | | CTACTGCATCACCAAGCCCG | |
| | | | AGGTGATCTTCAAGATCGAG | |
| | | | CAGGGCGAGGAGCCCTGGAT | |
| | | | CCTGGAGAAGGGCTTCCCCA | |
| | | | GCCAGTGCCACCCCGAGAGA | |
| | | | (SEQ ID NO: 905) | |
| ZN571 | LVTFRDVAIDFSQEEWECLD | PHLLVTFRDVAIDFSQEEWE | CCCCACCTGCTGGTGACCTT | 7.45303805 |
| | PAQRDLYRDVMLENYSNLIS | CLDPAQRDLYRDVMLENYSN | CAGAGATGTGGCCATCGACT | |
| | L (SEQ ID NO: 21) | LISLDLESSCVTKKLSPEKE | TCAGCCAGGAGGAGTGGGAG | |
| | | IYEMESLQWENMGKRINHHL | TGCCTGGACCCCGCCCAGAG | |
| | | (SEQ ID NO: 22) | AGACCTGTACAGAGATGTGA | |
| | | | TGCTGGAGAACTACAGCAAC | |
| | | | CTGATCAGCCTGGACCTGGA | |
| | | | GAGCAGCTGCGTGACCAAGA | |
| | | | AGCTGAGCCCCGAGAAGGAG | |
| | | | ATCTACGAGATGGAGAGCCT | |
| | | | GCAGTGGGAGAACATGGGCA | |
| | | | AGAGAATCAACCACCACCTG | |
| | | | (SEQ ID NO: 906) | |
| ZN699 | SVVFEDVAVDFTQEEWALLD | EEERKTAELQKNRIQDSVVF | GAGGAGGAGAGAAAGACCGC | 7.44633076 |
| | LAQRNLYRDVMLENFQNLAS | EDVAVDFTQEEWALLDLAQR | CGAGCTGCAGAAGAACAGAA | |
| | L (SEQ ID NO: 23) | NLYRDVMLENFQNLASLGYP | TCCAGGACAGCGTGGTGTTC | |
| | | LHTPHLISQWEQEEDLQTVK | GAGGACGTGGCCGTGGACTT | |
| | | (SEQ ID NO: 24) | CACCCAGGAGGAGTGGGCCC | |
| | | | TGCTGGACCTGGCCCAGAGA | |
| | | | AACCTGTACAGAGATGTGAT | |
| | | | GCTGGAGAACTTCCAGAACC | |
| | | | TGGCCAGCCTGGGCTACCCC | |
| | | | CTGCACACCCCCCACCTGAT | |
| | | | CAGCCAGTGGGAGCAGGAGG | |
| | | | AGGACCTGCAGACCGTGAAG | |
| | | | (SEQ ID NO: 907) | |
| ZN726 | LLTFRDVAIEFSLEEWQCLD | GLLTFRDVAIEFSLEEWQCL | GGCCTGCTGACCTTCAGAGA | 7.44588981 |
| | TAQKNLYRNVMLENYRNLAF | DTAQKNLYRNVMLENYRNLA | TGTGGCCATCGAGTTCAGCC | |
| | L (SEQ ID NO: 25) | FLGIAVSKPDLIICLEKEKE | TGGAGGAGTGGCAGTGCCTG | |
| | | PWNMKRDEMVDEPPGICPHF | GACACCGCCCAGAAGAACCT | |
| | | (SEQ ID NO: 26) | GTACAGAAACGTGATGCTGG | |
| | | | AGAACTACAGAAACCTGGCC | |
| | | | TTCCTGGGCATCGCCGTGAG | |
| | | | CAAGCCCGACCTGATCATCT | |
| | | | GCCTGGAGAAGGAGAAGGAG | |
| | | | CCCTGGAACATGAAGAGAGA | |
| | | | TGAGATGGTGGACGAGCCCC | |
| | | | CCGGCATCTGCCCCCACTTC | |
| | | | (SEQ ID NO: 908) | |
| ZIK1 | CVTFEDIAIYFSQDEWGLLD | RAPTQVTVSPETHMDLTKGC | AGAGCCCCCACCCAGGTGAC | 7.43302782 |
| | EAQRLLYLEVMLENFALVAS | VTFEDIAIYFSQDEWGLLDE | CGTGAGCCCCGAGACCCACA | |
| | L (SEQ ID NO: 27) | AQRLLYLEVMLENFALVASL | TGGACCTGACCAAGGGCTGC | |
| | | GCGHGTEDEETPSDQNVSVG | GTGACCTTCGAGGACATCGC | |
| | | (SEQ ID NO: 28) | CATCTACTTCAGCCAGGACG | |
| | | | AGTGGGGCCTGCTGGACGAG | |
| | | | GCCCAGAGACTGCTGTACCT | |
| | | | GGAGGTGATGCTGGAGAACT | |
| | | | TCGCCCTGGTGGCCAGCCTG | |
| | | | GGCTGCGGCCACGGCACCGA | |
| | | | GGACGAAGAGACCCCTAGCG | |
| | | | ACCAGAACGTGAGCGTGGGC | |
| | | | (SEQ ID NO: 909) | |
| ZNF2 | SVTFEDVAVVFTDEEWSRLV | AAVSPTTRCQESVTFEDVAV | GCCGCCGTGAGCCCCACCAC | 7.40745859 |
| | PIQRDLYKEVMLENYNSIVS | VFTDEEWSRLVPIQRDLYKE | CAGATGCCAGGAGAGCGTGA | |
| | L (SEQ ID NO: 29) | VMLENYNSIVSLGLPVPQPD | CCTTCGAGGACGTGGCCGTG | |
| | | VIFQLKRGDKPWMVDLHGSE | GTGTTCACCGACGAGGAGTG | |
| | | (SEQ ID NO: 30) | GAGCAGACTGGTGCCCATCC | |
| | | | AGAGAGACCTGTACAAGGAG | |
| | | | GTGATGCTGGAGAACTACAA | |
| | | | CAGCATCGTGAGCCTGGGCC | |
| | | | TGCCCGTGCCCCAGCCCGAC | |
| | | | GTGATCTTCCAGCTGAAGAG | |
| | | | AGGCGACAAGCCCTGGATGG | |
| | | | TGGACCTGCACGGCAGCGAG | |
| | | | (SEQ ID NO: 910) | |
| Z705F | KVTFEDVAIDFTQEEWDMMD | HSLEKVTFEDVAIDFTQEEW | CACAGCCTGGAGAAGGTGAC | 7.40598629 |
| | TSKRKLYRDVMLENISHLVS | DMMDTSKRKLYRDVMLENIS | CTTCGAGGACGTGGCCATCG | |
| | L (SEQ ID NO: 31) | HLVSLGYQISKSYIILQLEQ | ACTTCACCCAGGAGGAGTGG | |
| | | GKELWREGRVFLQDQNPDRE | GACATGATGGACACCAGCAA | |
| | | (SEQ ID NO: 32) | GAGAAAGCTGTACAGAGATG | |
| | | | TGATGCTGGAGAACATCAGC | |
| | | | CACCTGGTGAGCCTGGGCTA | |
| | | | CCAGATCAGCAAGAGCTACA | |
| | | | TCATCCTGCAGCTGGAGCAG | |
| | | | GGCAAGGAGCTGTGGAGAGA | |
| | | | GGGCAGAGTGTTCCTGCAGG | |
| | | | ACCAGAACCCCGACAGAGAG | |
| | | | (SEQ ID NO: 911) | |
| ZNF14 | SVSFEDVAVNFTLEEWALLD | DSVSFEDVAVNFTLEEWALL | GACAGCGTGAGCTTCGAGGA | 7.3912024 |
| | SSQKKLYEDVMQETFKNLVC | DSSQKKLYEDVMQETFKNLV | CGTGGCCGTGAACTTCACCC | |
| | L (SEQ ID NO: 33) | CLGKKWEDQDIEDDHRNQGK | TGGAGGAGTGGGCCCTGCTG | |
| | | NRRCHMVERLCESRRGSKCG | GACAGCAGCCAGAAGAAGCT | |
| | | (SEQ ID NO: 34) | GTACGAGGACGTGATGCAGG | |
| | | | AGACCTTCAAGAACCTGGTG | |
| | | | TGCCTGGGCAAGAAGTGGGA | |
| | | | GGACCAGGACATCGAGGACG | |
| | | | ACCACAGAAACCAGGGCAAG | |
| | | | AACAGAAGATGCCACATGGT | |
| | | | GGAGAGACTGTGCGAGAGCA | |
| | | | GAAGAGGCAGCAAGTGCGGC | |
| | | | (SEQ ID NO: 912) | |
| ZN471 | LVTFKDVAIDFSQEEWQWMN | NVEVVKVMPQDLVTFKDVAI | AACGTGGAGGTGGTGAAGGT | 7.38691832 |
| | PAQKRLYRSMMLENYQSLVS | DFSQEEWQWMNPAQKRLYRS | GATGCCCCAGGACCTGGTGA | |
| | L (SEQ ID NO: 35) | MMLENYQSLVSLGLCISKPY | CCTTCAAGGACGTGGCCATC | |
| | | VISLLEQGREPWEMTSEMTR | GACTTCAGCCAGGAGGAGTG | |
| | | (SEQ ID NO: 36) | GCAGTGGATGAACCCCGCCC | |
| | | | AGAAGAGACTGTACAGAAGC | |
| | | | ATGATGCTGGAGAACTACCA | |
| | | | GAGCCTGGTGAGCCTGGGCC | |
| | | | TGTGCATCAGCAAGCCCTAC | |
| | | | GTGATCAGCCTGCTGGAGCA | |
| | | | GGGCAGAGAGCCCTGGGAGA | |
| | | | TGACCAGCGAGATGACCAGA | |
| | | | (SEQ ID NO: 913) | |
| ZN624 | SVTFKDVAIDFTLEEWRLMD | TQPDEDLHLQAEETQLVKES | ACCCAGCCCGACGAGGACCT | 7.37615807 |
| | PTQRNLHKDVMLENYRNLVS | VTFKDVAIDFTLEEWRLMDP | GCACCTGCAGGCCGAGGAGA | |
| | L (SEQ ID NO: 37) | TQRNLHKDVMLENYRNLVSL | CCCAGCTGGTGAAGGAGAGC | |
| | | GLAVSKPDMISHLENGKGPW | GTGACCTTCAAGGACGTGGC | |
| | | (SEQ ID NO: 38) | CATCGACTTCACCCTGGAGG | |
| | | | AGTGGAGACTGATGGACCCC | |
| | | | ACCCAGAGAAACCTGCACAA | |
| | | | GGACGTGATGCTGGAGAACT | |
| | | | ACAGAAACCTGGTGAGCCTG | |
| | | | GGCCTGGCCGTGAGCAAGCC | |
| | | | CGACATGATCAGCCACCTGG | |
| | | | AGAACGGCAAGGGCCCCTGG | |
| | | | (SEQ ID NO: 914) | |
| ZNF84 | SFSFDDLSVDFTQKEWQLLD | TMLQESFSFDDLSVDFTQKE | ACCATGCTGCAGGAGAGCTT | 7.37354184 |
| | PSQKNLYKDVMLENYSSLVS | WQLLDPSQKNLYKDVMLENY | CAGCTTCGACGACCTGAGCG | |
| | L (SEQ ID NO: 39) | SSLVSLGYEVMKPDVIFKLE | TGGACTTCACCCAGAAGGAG | |
| | | QGEEPWVGDGEIPSSDSPEV | TGGCAGCTGCTGGACCCCAG | |
| | | (SEQ ID NO: 40) | CCAGAAGAACCTGTACAAGG | |
| | | | ACGTGATGCTGGAGAACTAC | |
| | | | AGCAGCCTGGTGAGCCTGGG | |
| | | | CTACGAGGTGATGAAGCCCG | |
| | | | ACGTGATCTTCAAGCTGGAG | |
| | | | CAGGGCGAGGAGCCCTGGGT | |
| | | | GGGCGACGGCGAGATCCCTA | |
| | | | GCAGCGACAGCCCCGAGGTG | |
| | | | (SEQ ID NO: 915) | |
| ZNF7 | VVTFGDVAVHFSREEWQCLD | EVVTFGDVAVHFSREEWQCL | GAGGTGGTGACCTTCGGCGA | 7.35816861 |
| | PGQRALYREVMLENHSSVAG | DPGQRALYREVMLENHSSVA | CGTGGCCGTGCACTTCAGCA | |
| | (SEQ ID NO: 41) | GLAGFLVFKPELISRLEQGE | GAGAGGAGTGGCAGTGCCTG | |
| | | EPWVLDLQGAEGTEAPRTSK | GACCCCGGCCAGAGAGCCCT | |
| | | (SEQ ID NO: 42) | GTACAGAGAGGTGATGCTGG | |
| | | | AGAACCACAGCAGCGTGGCC | |
| | | | GGCCTGGCCGGCTTCCTGGT | |
| | | | GTTCAAGCCCGAGCTGATCA | |
| | | | GCAGACTGGAGCAGGGCGAG | |
| | | | GAGCCCTGGGTGCTGGACCT | |
| | | | GCAGGGCGCCGAAGGCACAG | |
| | | | AGGCCCCCAGAACCAGCAAG | |
| | | | (SEQ ID NO: 916) | |
| ZN891 | PMTFKDVAVEFTQEEWMMLD | RNAEEERMIAVFLTTWLQEP | AGAAACGCCGAGGAGGAGAG | 7.35404032 |
| | SAQRSLYRDVMLENYRNLTS | MTFKDVAVEFTQEEWMMLDS | AATGATCGCCGTGTTCCTGA | |
| | V (SEQ ID NO: 43) | AQRSLYRDVMLENYRNLTSV | CCACCTGGCTGCAGGAGCCC | |
| | | EYQLYRLTVISPLDQEEIRN | ATGACCTTCAAGGACGTGGC | |
| | | (SEQ ID NO: 44) | CGTGGAGTTCACCCAGGAGG | |
| | | | AGTGGATGATGCTGGACAGC | |
| | | | GCCCAGAGAAGCCTGTACAG | |
| | | | AGATGTGATGCTGGAGAACT | |
| | | | ACAGAAACCTGACCAGCGTG | |
| | | | GAGTACCAGCTGTACAGACT | |
| | | | GACCGTGATCAGCCCCCTGG | |
| | | | ACCAGGAGGAGATCAGAAAC | |
| | | | (SEQ ID NO: 917) | |
| ZN337 | FLAFGDVTVDFTQKEWRLLS | GPQGARRQAFLAFGDVTVDF | GGCCCCCAGGGCGCCAGAAG | 7.3403856 |
| | PAQRALYREVTLENYSHLVS | TQKEWRLLSPAQRALYREVT | ACAGGCCTTCCTGGCCTTCG | |
| | L (SEQ ID NO: 45) | LENYSHLVSLGILHSKPELI | GCGACGTGACCGTGGACTTC | |
| | | RRLEQGEVPWGEERRRRPGP | ACCCAGAAGGAGTGGAGACT | |
| | | (SEQ ID NO: 46) | GCTGAGCCCCGCCCAGAGAG | |
| | | | CCCTGTACAGAGAGGTGACC | |
| | | | CTGGAGAACTACAGCCACCT | |
| | | | GGTGAGCCTGGGCATCCTGC | |
| | | | ACAGCAAGCCCGAGCTGATC | |
| | | | AGAAGACTGGAGCAGGGCGA | |
| | | | GGTGCCCTGGGGCGAGGAGA | |
| | | | GAAGAAGAAGACCCGGCCCC | |
| | | | (SEQ ID NO: 918) | |
| Z705G | KLTFEDVAIDFTQEEWAMMD | HSLKKLTFEDVAIDFTQEEW | CACAGCCTGAAGAAGCTGAC | 7.33888308 |
| | TSKRKLYRDVMLENISHLVS | AMMDTSKRKLYRDVMLENIS | CTTCGAGGACGTGGCCATCG | |
| | L (SEQ ID NO: 47) | HLVSLGYQISKSYIILQLEQ | ACTTCACCCAGGAGGAGTGG | |
| | | GKELWREGRVFLQDQNPNRE | GCCATGATGGACACCAGCAA | |
| | | (SEQ ID NO: 48) | GAGAAAGCTGTACAGAGATG | |
| | | | TGATGCTGGAGAACATCAGC | |
| | | | CACCTGGTGAGCCTGGGCTA | |
| | | | CCAGATCAGCAAGAGCTACA | |
| | | | TCATCCTGCAGCTGGAGCAG | |
| | | | GGCAAGGAGCTGTGGAGAGA | |
| | | | GGGCAGAGTGTTCCTGCAGG | |
| | | | ACCAGAACCCCAACAGAGAG | |
| | | | (SEQ ID NO: 919) | |
| ZN529 | LVTLRDVVINFSQEEWEYLD | MPEVEFPDQFFTVLTMDHEL | ATGCCCGAGGTGGAGTTCCC | 7.33722191 |
| | SAQRNLYWDVMMENYSNLLS | VTLRDVVINFSQEEWEYLDS | CGACCAGTTCTTCACCGTGC | |
| | L (SEQ ID NO: 49) | AQRNLYWDVMMENYSNLLSL | TGACCATGGACCACGAGCTG | |
| | | DLESRNETKHLSVGKDIIQN | GTGACCCTGAGAGATGTGGT | |
| | | (SEQ ID NO: 50) | GATCAACTTCAGCCAGGAGG | |
| | | | AGTGGGAGTACCTGGACAGC | |
| | | | GCCCAGAGAAACCTGTACTG | |
| | | | GGACGTGATGATGGAGAACT | |
| | | | ACAGCAACCTGCTGAGCCTG | |
| | | | GACCTGGAGAGCAGAAACGA | |
| | | | GACCAAGCACCTGAGCGTGG | |
| | | | GCAAGGACATCATCCAGAAC | |
| | | | (SEQ ID NO: 920) | |
| ZN729 | PLTFRDVTIEFSLEEWQCLD | PGAPGSLEMGPLTFRDVTIE | CCCGGCGCCCCCGGCAGCCT | 7.33489189 |
| | TVQQNLYRDVMLENYRNLVF | FSLEEWQCLDTVQQNLYRDV | GGAGATGGGCCCCCTGACCT | |
| | L (SEQ ID NO: 51) | MLENYRNLVFLGMAVFKPDL | TCAGAGATGTGACCATCGAG | |
| | | ITCLKQGKEPWNMKRHEMVT | TTCAGCCTGGAGGAGTGGCA | |
| | | (SEQ ID NO: 52) | GTGCCTGGACACCGTGCAGC | |
| | | | AGAACCTGTACAGAGATGTG | |
| | | | ATGCTGGAGAACTACAGAAA | |
| | | | CCTGGTGTTCCTGGGCATGG | |
| | | | CCGTGTTCAAGCCCGACCTG | |
| | | | ATCACCTGCCTGAAGCAGGG | |
| | | | CAAGGAGCCCTGGAACATGA | |
| | | | AGAGACACGAGATGGTGACC | |
| | | | (SEQ ID NO: 921) | |
| ZN419 | YVTFEDVAVYFSQEEWRLLD | RDPAQVPVAADLLTDHEEGY | AGAGACCCCGCCCAGGTGCC | 7.33241867 |
| | DAQRLLYRNVMLENFTLLAS | VTFEDVAVYFSQEEWRLLDD | CGTGGCCGCCGACCTGCTGA | |
| | L (SEQ ID NO: 53) | AQRLLYRNVMLENFTLLASL | CCGACCACGAAGAAGGCTAC | |
| | | GLASSKTHEITQLESWEEPF | GTGACCTTCGAGGACGTGGC | |
| | | (SEQ ID NO: 54) | CGTGTACTTCAGCCAGGAGG | |
| | | | AGTGGAGACTGCTGGACGAC | |
| | | | GCCCAGAGACTGCTGTACAG | |
| | | | AAACGTGATGCTGGAGAACT | |
| | | | TCACCCTGCTGGCCAGCCTG | |
| | | | GGCCTGGCCAGCAGCAAGAC | |
| | | | CCACGAGATCACCCAGCTGG | |
| | | | AGAGCTGGGAGGAGCCCTTC | |
| | | | (SEQ ID NO: 922) | |
| Z705A | KVTFEDVAIDFTQEEWAMMD | HSLKKVTFEDVAIDFTQEEW | CACAGCCTGAAGAAGGTGAC | 7.32024193 |
| | TSKRKLYRDVMLENISHLVS | AMMDTSKRKLYRDVMLENIS | CTTCGAGGACGTGGCCATCG | |
| | L (SEQ ID NO: 55) | HLVSLGYQISKSYIILQLEQ | ACTTCACCCAGGAGGAGTGG | |
| | | GKELWREGREFLQDQNPDRE | GCCATGATGGACACCAGCAA | |
| | | (SEQ ID NO: 56) | GAGAAAGCTGTACAGAGATG | |
| | | | TGATGCTGGAGAACATCAGC | |
| | | | CACCTGGTGAGCCTGGGCTA | |
| | | | CCAGATCAGCAAGAGCTACA | |
| | | | TCATCCTGCAGCTGGAGCAG | |
| | | | GGCAAGGAGCTGTGGAGAGA | |
| | | | GGGCAGAGAGTTCCTGCAGG | |
| | | | ACCAGAACCCCGACAGAGAG | |
| | | | (SEQ ID NO: 923) | |
| ZNF45 | AVTFKDVAVVFSEEELQLLD | TKSKEAVTFKDVAVVFSEEE | ACCAAGAGCAAGGAGGCCGT | 7.31275735 |
| | LAQRKLYRDVMLENFRNVVS | LQLLDLAQRKLYRDVMLENF | GACCTTCAAGGACGTGGCCG | |
| | V (SEQ ID NO: 57) | RNVVSVGHQSTPDGLPQLER | TGGTGTTCAGCGAGGAGGAG | |
| | | EEKLWMMKMATQRDNSSGAK | CTGCAGCTGCTGGACCTGGC | |
| | | (SEQ ID NO: 58) | CCAGAGAAAGCTGTACAGAG | |
| | | | ATGTGATGCTGGAGAACTTC | |
| | | | AGAAACGTGGTGAGCGTGGG | |
| | | | CCACCAGAGCACCCCCGACG | |
| | | | GCCTGCCCCAGCTTGAGAGA | |
| | | | GAGGAGAAGCTGTGGATGAT | |
| | | | GAAGATGGCCACCCAGAGAG | |
| | | | ACAACAGCAGCGGCGCCAAG | |
| | | | (SEQ ID NO: 924) | |
| ZN302 | QVTFSDVAIDFSHEEWACLD | SQVTFSDVAIDFSHEEWACL | AGCCAGGTGACCTTCAGCGA | 7.27433142 |
| | SAQRDLYKDVMVQNYENLVS | DSAQRDLYKDVMVQNYENLV | CGTGGCCATCGACTTCAGCC | |
| | V (SEQ ID NO: 59) | SVGLSVTKPYVIMLLEDGKE | ACGAGGAGTGGGCCTGCCTG | |
| | | PWMMEKKLSKAYPFPLSHSV | GACAGCGCCCAGAGAGACCT | |
| | | (SEQ ID NO: 60) | GTACAAGGACGTGATGGTGC | |
| | | | AGAACTACGAGAACCTGGTG | |
| | | | AGCGTGGGCCTGAGCGTGAC | |
| | | | CAAGCCCTACGTGATCATGC | |
| | | | TGCTGGAGGACGGCAAGGAG | |
| | | | CCCTGGATGATGGAGAAGAA | |
| | | | GCTGAGCAAGGCCTACCCCT | |
| | | | TCCCCCTGAGCCACAGCGTG | |
| | | | (SEQ ID NO: 925) | |
| ZN486 | SLQFRDVAVEFSLEEWHQLD | PGPLRSLEMESLQFRDVAVE | CCCGGCCCCCTGAGAAGCCT | 7.27242434 |
| | TAQQNLYRDVMLENYRHLVF | FSLEEWHCLDTAQQNLYRDV | GGAGATGGAGAGCCTGCAGT | |
| | L (SEQ ID NO: 61) | MLENYRHLVFLGIIVSKPDL | TCAGAGATGTGGCCGTGGAG | |
| | | ITCLEQGIKPLTMKRHEMIA | TTCAGCCTGGAGGAGTGGCA | |
| | | (SEQ ID NO: 62) | CTGCCTGGACACCGCCCAGC | |
| | | | AGAACCTGTACAGAGATGTG | |
| | | | ATGCTGGAGAACTACAGACA | |
| | | | CCTGGTGTTCCTGGGCATCA | |
| | | | TCGTGAGCAAGCCCGACCTG | |
| | | | ATCACCTGCCTGGAGCAGGG | |
| | | | CATCAAGCCCCTGACCATGA | |
| | | | AGAGACACGAGATGATCGCC | |
| | | | (SEQ ID NO: 926) | |
| ZN621 | SVTFEDVAVYFTQNQWASLD | LQTTWPQESVTFEDVAVYFT | CTGCAGACCACCTGGCCCCA | 7.25940008 |
| | PAQRALYGEVMLENYANVAS | QNQWASLDPAQRALYGEVML | GGAGAGCGTGACCTTCGAGG | |
| | (SEQ ID NO: 63) | ENYANVASLVAFPFPKPALI | ACGTGGCCGTGTACTTCACC | |
| | | SHLERGEAPWGPDPWDTEIL | CAGAACCAGTGGGCCAGCCT | |
| | | (SEQ ID NO: 64) | GGACCCCGCCCAGAGAGCCC | |
| | | | TGTACGGCGAGGTGATGCTG | |
| | | | GAGAACTACGCCAACGTGGC | |
| | | | CAGCCTGGTGGCCTTCCCCT | |
| | | | TCCCCAAGCCCGCCCTGATC | |
| | | | AGCCACCTGGAGAGAGGCGA | |
| | | | GGCCCCCTGGGGACCTGACC | |
| | | | CCTGGGACACCGAGATCCTG | |
| | | | (SEQ ID NO: 927) | |
| ZN688 | TVSFADVAVYFSPEEWGCLR | APLLAPRPGETRPGCRKPGT | GCCCCCCTGCTGGCCCCCAG | 7.2566174 |
| | PAQRALYRDVMQETYGHLGA | VSFADVAVYFSPEEWGCLRP | ACCCGGCGAGACCAGACCCG | |
| | L (SEQ ID NO: 65) | AQRALYRDVMQETYGHLGAL | GCTGCAGAAAGCCCGGCACA | |
| | | GFPGPKPALISWMEQESEAW | GTGAGCTTCGCCGACGTGGC | |
| | | (SEQ ID NO: 66) | CGTGTACTTCAGCCCCGAGG | |
| | | | AGTGGGGCTGCCTGAGACCC | |
| | | | GCCCAGAGAGCCCTGTACAG | |
| | | | AGATGTGATGCAGGAGACCT | |
| | | | ACGGCCACCTGGGCGCCCTG | |
| | | | GGCTTCCCCGGCCCCAAACC | |
| | | | TGCTCTGATCAGCTGGATGG | |
| | | | AGCAGGAGAGCGAGGCCTGG | |
| | | | (SEQ ID NO: 928) | |
| ZN33A | SVSFKDVTVGFTQEEWQHLD | NKVEQKSQESVSFKDVTVGF | AACAAGGTGGAGCAGAAGAG | 7.23239827 |
| | PSQRALYRDVMLENYSNLVS | TQEEWQHLDPSQRALYRDVM | CCAGGAGAGCGTGAGCTTCA | |
| | V (SEQ ID NO: 67) | LENYSNLVSVGYCVHKPEVI | AGGACGTGACCGTGGGCTTC | |
| | | FRLQQGEEPWKQFEEFPSQS | ACCCAGGAGGAGTGGCAGCA | |
| | | (SEQ ID NO: 68) | CCTGGACCCCAGCCAGAGAG | |
| | | | CCCTGTACAGAGATGTGATG | |
| | | | CTGGAGAACTACAGCAACCT | |
| | | | GGTGAGCGTGGGCTACTGCG | |
| | | | TGCACAAGCCCGAGGTGATC | |
| | | | TTCAGACTGCAGCAGGGCGA | |
| | | | GGAGCCCTGGAAGCAGGAGG | |
| | | | AGGAGTTCCCCAGCCAGAGC | |
| | | | (SEQ ID NO: 929) | |
| ZN554 | LVTFEDVSMDFSQEEWELLE | CFSQEERMAAGYLPRWSQEL | TGCTTCAGCCAGGAGGAGAG | 7.22964061 |
| | PAQKNLYREVMLENYRNVVS | VTFEDVSMDFSQEEWELLEP | AATGGCCGCCGGCTACCTGC | |
| | L (SEQ ID NO: 69) | AQKNLYREVMLENYRNVVSL | CCAGATGGAGCCAGGAGCTG | |
| | | EALKNQCTDVGIKEGPLSPA | GTGACCTTCGAGGACGTGAG | |
| | | (SEQ ID NO: 70) | CATGGACTTCAGCCAGGAGG | |
| | | | AGTGGGAGCTGCTGGAGCCC | |
| | | | GCCCAGAAGAACCTGTACAG | |
| | | | AGAGGTGATGCTGGAGAACT | |
| | | | ACAGAAACGTGGTGAGCCTG | |
| | | | GAGGCCCTGAAGAACCAGTG | |
| | | | CACCGACGTGGGCATCAAGG | |
| | | | AGGGCCCCCTGAGCCCCGCC | |
| | | | (SEQ ID NO: 930) | |
| ZN878 | SVAFEDVAVNFTQEEWALLD | DSVAFEDVAVNFTQEEWALL | GACAGCGTGGCCTTCGAGGA | 7.21922256 |
| | PSQKNLYREVMQETLRNLTS | DPSQKNLYREVMQETLRNLT | CGTGGCCGTGAACTTCACCC | |
| | I (SEQ ID NO: 71) | SIGKKWNNQYIEDEHQNPRR | AGGAGGAGTGGGCCCTGCTG | |
| | | NLRRLIGERLSESKESHQHG | GACCCCAGCCAGAAGAACCT | |
| | | (SEQ ID NO: 72) | GTACAGAGAGGTGATGCAGG | |
| | | | AGACCCTGAGAAACCTGACC | |
| | | | AGCATCGGCAAGAAGTGGAA | |
| | | | CAACCAGTACATCGAGGACG | |
| | | | AGCACCAGAACCCCAGAAGA | |
| | | | AACCTGAGAAGACTGATCGG | |
| | | | CGAGAGACTGAGCGAGAGCA | |
| | | | AGGAGAGCCACCAGCACGGC | |
| | | | (SEQ ID NO: 931) | |
| ZN772 | QVNFEDVFVYFSQEEWVLLD | MGPAQVPMNSEVIVDPIQGQ | ATGGGCCCCGCCCAGGTGCC | 7.1961596 |
| | EAQRLLYRDVMLENFALMAS | VNFEDVFVYFSQEEWVLLDE | CATGAACAGCGAGGTGATCG | |
| | L (SEQ ID NO: 73) | AQRLLYRDVMLENFALMASL | TGGACCCCATCCAGGGCCAG | |
| | | GHTSFMSHIVASLVMGSEPW | GTGAACTTCGAGGACGTGTT | |
| | | (SEQIDNO:74) | CGTGTACTTCAGCCAGGAGG | |
| | | | AGTGGGTGCTGCTGGACGAG | |
| | | | GCCCAGAGACTGCTGTACAG | |
| | | | AGATGTGATGCTGGAGAACT | |
| | | | TCGCCCTGATGGCCAGCCTG | |
| | | | GGCCACACCAGCTTCATGAG | |
| | | | CCACATCGTGGCCAGCCTGG | |
| | | | TGATGGGCAGCGAGCCCTGG | |
| | | | (SEQ ID NO: 932) | |
| ZN224 | AMTFKDVAVVFTEEELGLLD | TTFKEAMTFKDVAVVFTEEE | ACCACCTTCAAGGAGGCCAT | 7.18876477 |
| | LAQRKLYRDVMLENFRNLLS | LGLLDLAQRKLYRDVMLENF | GACCTTCAAGGACGTGGCCG | |
| | V (SEQ ID NO: 75) | RNLLSVGHQAFHRDTFHFLR | TGGTGTTCACCGAGGAGGAG | |
| | | EEKIWMMKTAIQREGNSGDK | CTGGGCCTGCTGGACCTGGC | |
| | | (SEQ ID NO: 76) | CCAGAGAAAGCTGTACAGAG | |
| | | | ATGTGATGCTGGAGAACTTC | |
| | | | AGAAACCTGCTGAGCGTGGG | |
| | | | CCACCAGGCCTTCCACAGAG | |
| | | | ACACCTTCCACTTCCTGAGA | |
| | | | GAGGAGAAGATCTGGATGAT | |
| | | | GAAGACCGCCATCCAGAGAG | |
| | | | AGGGCAACAGCGGCGACAAG | |
| | | | (SEQ ID NO: 933) | |
| ZN184 | AVTFKDVIVDFTQEEWKQLD | DSTLLQGGHNLLSSASFQEA | GACAGCACCCTGCTGCAGGG | 7.18783852 |
| | PGQRDLFRDVTLENYTHLVS | VTFKDVIVDFTQEEWKQLDP | CGGCCACAACCTGCTGAGCA | |
| | I (SEQ ID NO: 77) | GQRDLFRDVTLENYTHLVSI | GCGCCAGCTTCCAGGAGGCC | |
| | | GLQVSKPDVISQLEQGTEPW | GTGACCTTCAAGGACGTGAT | |
| | | (SEQ ID NO: 78) | CGTGGACTTCACCCAGGAGG | |
| | | | AGTGGAAGCAGCTGGACCCC | |
| | | | GGCCAGAGAGACCTGTTCAG | |
| | | | AGATGTGACCCTGGAGAACT | |
| | | | ACACCCACCTGGTGAGCATC | |
| | | | GGCCTGCAGGTGAGCAAGCC | |
| | | | CGACGTGATCAGCCAGCTGG | |
| | | | AGCAGGGCACCGAGCCCTGG | |
| | | | (SEQ ID NO: 934) | |
| ZN544 | SVCFEDVAMAFTQEEWEQLD | EARSMLVPPQASVCFEDVAM | GAGGCCAGAAGCATGCTGGT | 7.18695522 |
| | LAQRTLYREVTLETWEHIVS | AFTQEEWEQLDLAQRTLYRE | GCCCCCCCAGGCCAGCGTGT | |
| | L (SEQ ID NO: 79) | VTLETWEHIVSLGLFLSKSD | GCTTCGAGGACGTGGCCATG | |
| | | VISQLEQEEDLCRAEQEAPR | GCCTTCACCCAGGAGGAGTG | |
| | | (SEQ ID NO: 80) | GGAGCAGCTGGACCTGGCCC | |
| | | | AGAGAACCCTGTACAGAGAG | |
| | | | GTGACCCTGGAGACCTGGGA | |
| | | | GCACATCGTGAGCCTGGGCC | |
| | | | TGTTCCTGAGCAAGAGCGAC | |
| | | | GTGATCAGCCAGCTGGAGCA | |
| | | | GGAGGAGGACCTGTGCAGAG | |
| | | | CCGAGCAGGAGGCCCCCAGA | |
| | | | (SEQ ID NO: 935) | |
| ZNF57 | SVVFEDVAVDFTLEEWALLD | DSVVFEDVAVDFTLEEWALL | GACAGCGTGGTGTTCGAGGA | 7.1854619 |
| | SAQRDLYRDVMLETFRNLAS | DSAQRDLYRDVMLETFRNLA | CGTGGCCGTGGACTTCACCC | |
| | V (SEQ ID NO: 81) | SVDDGTQFKANGSVSLQDMY | TGGAGGAGTGGGCCCTGCTG | |
| | | GQEKSKEQTIPNFTGNNSCA | GACAGCGCCCAGAGAGACCT | |
| | | (SEQ ID NO: 82) | GTACAGAGATGTGATGCTGG | |
| | | | AGACCTTCAGAAACCTGGCC | |
| | | | AGCGTGGACGACGGCACCCA | |
| | | | GTTCAAGGCCAACGGCAGCG | |
| | | | TGAGCCTGCAGGACATGTAC | |
| | | | GGCCAGGAGAAGAGCAAGGA | |
| | | | GCAGACCATCCCCAACTTCA | |
| | | | CCGGCAACAACAGCTGCGCC | |
| | | | (SEQ ID NO: 936) | |
| ZN283 | LVTFRDVAIDFSQEEWECLD | EESHGALISSCNSRTMTDGL | GAGGAGAGCCACGGCGCCCT | 7.16688066 |
| | PAQRDLYVDVMLENYSNLVS | VTFRDVAIDFSQEEWECLDP | GATCAGCAGCTGCAACAGCA | |
| | L (SEQ ID NO: 83) | AQRDLYVDVMLENYSNLVSL | GAACCATGACCGACGGCCTG | |
| | | DLESKTYETKKIFSENDIFE | GTGACCTTCAGAGATGTGGC | |
| | | (SEQ ID NO: 84) | CATCGACTTCAGCCAGGAGG | |
| | | | AGTGGGAGTGCCTGGACCCC | |
| | | | GCCCAGAGAGACCTGTACGT | |
| | | | GGACGTGATGCTGGAGAACT | |
| | | | ACAGCAACCTGGTGAGCCTG | |
| | | | GACCTGGAGAGCAAGACCTA | |
| | | | CGAGACCAAGAAGATCTTCA | |
| | | | GCGAGAACGACATCTTCGAG | |
| | | | (SEQ ID NO: 937) | |
| ZN549 | HVTFEDIAVYFSQEEWGLLD | VITPQIPMVTEEFVKPSQGH | GTGATCACCCCCCAGATCCC | 7.14938492 |
| | EAQRCLYHDVMLENFSLMAS | VTFEDIAVYFSQEEWGLLDE | CATGGTGACCGAGGAGTTCG | |
| | V (SEQ ID NO: 85) | AQRCLYHDVMLENFSLMASV | TGAAGCCCAGCCAGGGCCAC | |
| | | GCLHGIEAEEAPSEQTLSAQ | GTGACCTTCGAGGACATCGC | |
| | | (SEQ ID NO: 86) | CGTGTACTTCAGCCAGGAGG | |
| | | | AGTGGGGCCTGCTGGACGAG | |
| | | | GCCCAGAGATGCCTGTACCA | |
| | | | CGACGTGATGCTGGAGAACT | |
| | | | TCAGCCTGATGGCCAGCGTG | |
| | | | GGCTGCCTGCACGGCATCGA | |
| | | | GGCCGAGGAGGCTCCTAGCG | |
| | | | AGCAGACCCTGAGCGCCCAG | |
| | | | (SEQ ID NO: 938) | |
| ZN211 | SVTFEDVAVYFSWEEWDLLD | VQLRPQTRMATALRDPASGS | GTGCAGCTGAGACCCCAGAC | 7.14721188 |
| | EAQKHLYFDVMLENFALTSS | VTFEDVAVYFSWEEWDLLDE | CAGAATGGCCACCGCCCTGA | |
| | L (SEQ ID NO: 87) | AQKHLYFDVMLENFALTSSL | GAGACCCCGCCAGCGGCAGC | |
| | | GCWCGVEHEETPSEQRISGE | GTGACCTTCGAGGACGTGGC | |
| | | (SEQ ID NO: 88) | CGTGTACTTCAGCTGGGAGG | |
| | | | AGTGGGACCTGCTGGACGAG | |
| | | | GCCCAGAAGCACCTGTACTT | |
| | | | CGACGTGATGCTGGAGAACT | |
| | | | TCGCCCTGACCAGCAGCCTG | |
| | | | GGCTGCTGGTGCGGCGTGGA | |
| | | | GCACGAGGAGACCCCCAGCG | |
| | | | AGCAGAGAATCAGCGGCGAG | |
| | | | (SEQ ID NO: 939) | |
| ZN506 | PLQFRDVAIEFSLEEWHCLD | GPLQFRDVAIEFSLEEWHCL | GGCCCCCTGCAGTTCAGAGA | 7.1466168 |
| | AAQRNLYRDVMLENYRNLIF | DAAQRNLYRDVMLENYRNLI | TGTGGCCATCGAGTTCAGCC | |
| | L (SEQ ID NO: 89) | FLGIVVSKPNLITCLEQGKK | TGGAGGAGTGGCACTGCCTG | |
| | | PLTMKRHEMIAKPPVMYSHF | GACGCCGCCCAGAGAAACCT | |
| | | (SEQ ID NO: 90) | GTACAGAGATGTGATGCTGG | |
| | | | AGAACTACAGAAACCTGATC | |
| | | | TTCCTGGGCATCGTGGTGAG | |
| | | | CAAGCCCAACCTGATCACCT | |
| | | | GCCTGGAGCAGGGCAAGAAG | |
| | | | CCCCTGACCATGAAGAGACA | |
| | | | CGAGATGATCGCCAAGCCCC | |
| | | | CCGTGATGTACAGCCACTTC | |
| | | | (SEQ ID NO: 940) | |
| ZN615 | SLTLEDVAVDFTWEEWQFLS | MQAQESLTLEDVAVDFTWEE | ATGCAGGCCCAGGAGAGCCT | 7.13864847 |
| | PAQKDLYRDVMLENYSNLVA | WQFLSPAQKDLYRDVMLENY | GACCCTGGAGGACGTGGCCG | |
| | V (SEQ ID NO: 91) | SNLVAVGYQASKPDALSKLE | TGGACTTCACCTGGGAGGAG | |
| | | RGEETCTTEDEIYSRICSEI | TGGCAGTTCCTGAGCCCCGC | |
| | | (SEQ ID NO: 92) | CCAGAAGGACCTGTACAGAG | |
| | | | ATGTGATGCTGGAGAACTAC | |
| | | | AGCAACCTGGTGGCCGTGGG | |
| | | | CTACCAGGCCAGCAAGCCCG | |
| | | | ACGCCCTGAGCAAGCTGGAG | |
| | | | AGAGGCGAGGAGACCTGCAC | |
| | | | CACCGAGGACGAGATCTACA | |
| | | | GCAGAATCTGCAGCGAGATC | |
| | | | (SEQ ID NO: 941) | |
| ZN253 | PLQFRDVAIEFSLEEWHQLD | GPLQFRDVAIEFSLEEWHCL | GGCCCCCTGCAGTTCAGAGA | 7.12597439 |
| | TAQRNLYRDVMLENYRNLVF | DTAQRNLYRDVMLENYRNLV | TGTGGCCATCGAGTTCAGCC | |
| | L (SEQ ID NO: 93) | FLGIVVSKPDLVTCLEQGKK | TGGAGGAGTGGCACTGCCTG | |
| | | PLTMERHEMIAKPPVMSSHF | GACACCGCCCAGAGAAACCT | |
| | | (SEQ ID NO: 94) | GTACAGAGATGTGATGCTGG | |
| | | | AGAACTACAGAAACCTGGTG | |
| | | | TTCCTGGGCATCGTGGTGAG | |
| | | | CAAGCCCGACCTGGTGACCT | |
| | | | GCCTGGAGCAGGGCAAGAAG | |
| | | | CCCCTGACCATGGAGAGACA | |
| | | | CGAGATGATCGCCAAGCCCC | |
| | | | CCGTGATGAGCAGCCACTTC | |
| | | | (SEQ ID NO: 942) | |
| ZN226 | AVTFKDVAVAFTEEELGLLG | NMFKEAVTFKDVAVAFTEEE | AACATGTTCAAGGAGGCCGT | 7.12032078 |
| | PAQRKLYRDVMVENFRNLLS | LGLLGPAQRKLYRDVMVENF | GACCTTCAAGGACGTGGCCG | |
| | V (SEQ ID NO: 95) | RNLLSVGHPPFKQDVSPIER | TGGCCTTCACCGAGGAGGAG | |
| | | NEQLWIMTTATRRQGNLGEK | CTGGGCCTGCTGGGCCCTGC | |
| | | (SEQ ID NO: 96) | TCAGAGAAAGCTGTACAGAG | |
| | | | ATGTGATGGTGGAGAACTTC | |
| | | | AGAAACCTGCTGAGCGTGGG | |
| | | | CCACCCCCCCTTCAAGCAGG | |
| | | | ACGTGAGCCCCATCGAGAGA | |
| | | | AACGAGCAGCTGTGGATCAT | |
| | | | GACCACCGCCACCAGAAGAC | |
| | | | AGGGCAACCTGGGCGAGAAG | |
| | | | (SEQ ID NO: 943) | |
| ZN730 | ALTFRDVAIEFSLEEWQCLD | GALTFRDVAIEFSLEEWQCL | GGCGCCCTGACCTTCAGAGA | 7.1167303 |
| | TEQQNLYRNVMLDNYRNLVF | DTEQQNLYRNVMLDNYRNLV | TGTGGCCATCGAGTTCAGCC | |
| | L (SEQ ID NO: 97) | FLGIAVSKPDLITCLEQEKE | TGGAGGAGTGGCAGTGCCTG | |
| | | PWNLKTHDMVAKPPVICSHI | GACACCGAGCAGCAGAACCT | |
| | | (SEQ ID NO: 98) | GTACAGAAACGTGATGCTGG | |
| | | | ACAACTACAGAAACCTGGTG | |
| | | | TTCCTGGGCATCGCCGTGAG | |
| | | | CAAGCCCGACCTGATCACCT | |
| | | | GCCTGGAGCAGGAGAAGGAG | |
| | | | CCCTGGAACCTGAAGACCCA | |
| | | | CGACATGGTGGCCAAGCCCC | |
| | | | CCGTGATCTGCAGCCACATC | |
| | | | (SEQ ID NO: 944) | |
| Z585A | SVSFRDVAIDFSREEWRHLD | SPQKSSALAPEDHGSSYEGS | AGCCCCCAGAAGAGCAGCGC | 7.11150182 |
| | PSQRNLYRDVMLETYSHLLS | VSFRDVAIDFSREEWRHLDP | CCTGGCCCCCGAGGACCACG | |
| | V (SEQ ID NO: 99) | SQRNLYRDVMLETYSHLLSV | GCAGCAGCTACGAGGGAAGC | |
| | | GYQVPEAEVVMLEQGKEPWA | GTGAGCTTCAGAGATGTGGC | |
| | | (SEQ ID NO: 100) | CATCGACTTCAGCAGAGAGG | |
| | | | AGTGGAGACACCTGGACCCC | |
| | | | AGCCAGAGAAACCTGTACAG | |
| | | | AGATGTGATGCTGGAGACCT | |
| | | | ACAGCCACCTGCTGAGCGTG | |
| | | | GGCTACCAGGTGCCCGAGGC | |
| | | | CGAGGTGGTGATGCTGGAGC | |
| | | | AGGGCAAGGAGCCCTGGGCC | |
| | | | (SEQ ID NO: 945) | |
| ZN732 | LLTFRDVAIEFSPEEWKCLD | ELLTFRDVAIEFSPEEWKCL | GAGCTGCTGACCTTCAGAGA | 7.10058289 |
| | PAQQNLYRDVMLENYRNLIS | DPAQQNLYRDVMLENYRNLI | TGTGGCCATCGAGTTCAGCC | |
| | L (SEQ ID NO: 101) | SLGVAISNPDLVIYLEQRKE | CCGAGGAGTGGAAGTGCCTG | |
| | | PYKVKIHETVAKHPAVCSHF | GACCCCGCCCAGCAGAACCT | |
| | | (SEQ ID NO: 102 | GTACAGAGATGTGATGCTGG | |
| | | | AGAACTACAGAAACCTGATC | |
| | | | AGCCTGGGCGTGGCCATCAG | |
| | | | CAACCCCGACCTGGTGATCT | |
| | | | ACCTGGAGCAGAGAAAGGAG | |
| | | | CCCTACAAGGTGAAGATCCA | |
| | | | CGAGACCGTGGCCAAGCACC | |
| | | | CCGCCGTGTGCAGCCACTTC | |
| | | | (SEQ ID NO: 946) | |
| ZN681 | PLKFRDVAIEFSLEEWQCLD | EPLKFRDVAIEFSLEEWQCL | GAGCCCCTGAAGTTCAGAGA | 7.09555392 |
| | TIQQNLYRNVMLENYRNLVF | DTIQQNLYRNVMLENYRNLV | TGTGGCCATCGAGTTCAGCC | |
| | L (SEQ ID NO: 103) | FLGIVVSKPDLITCLEQEKE | TGGAGGAGTGGCAGTGCCTG | |
| | | PWTRKRHRMVAEPPVICSHF | GACACCATCCAGCAGAACCT | |
| | | (SEQ ID NO: 104) | GTACAGAAACGTGATGCTGG | |
| | | | AGAACTACAGAAACCTGGTG | |
| | | | TTCCTGGGCATCGTGGTGAG | |
| | | | CAAGCCCGACCTGATCACCT | |
| | | | GCCTGGAGCAGGAGAAGGAG | |
| | | | CCCTGGACCAGAAAGAGACA | |
| | | | CAGAATGGTGGCCGAGCCCC | |
| | | | CCGTGATCTGCAGCCACTTC | |
| | | | (SEQ ID NO: 947) | |
| ZN667 | PITFGDLAIYFSQEEWEWLS | PSARGKSKSKAPITFGDLAI | CCCAGCGCCAGAGGCAAGAG | 7.08035538 |
| | PIQKDLYEDVMLENYRNLVS | YFSQEEWEWLSPIQKDLYED | CAAGAGCAAGGCCCCCATCA | |
| | L (SEQ ID NO: 105) | VMLENYRNLVSLGLSFRRPN | CCTTCGGCGACCTGGCCATC | |
| | | VITLLEKGKAPWMVEPVRRR | TACTTCAGCCAGGAGGAGTG | |
| | | (SEQ ID NO: 106) | GGAGTGGCTGAGCCCCATCC | |
| | | | AGAAGGACCTGTACGAGGAC | |
| | | | GTGATGCTGGAGAACTACAG | |
| | | | AAACCTGGTGAGCCTGGGCC | |
| | | | TGAGCTTCAGAAGACCCAAC | |
| | | | GTGATCACCCTGCTGGAGAA | |
| | | | GGGCAAGGCCCCCTGGATGG | |
| | | | TGGAGCCCGTGAGAAGAAGA | |
| | | | (SEQ ID NO: 948) | |
| ZN649 | SLTLEDVAVDFTWEEWQFLS | TKAQESLTLEDVAVDFTWEE | ACCAAGGCCCAGGAGAGCCT | 7.07364506 |
| | PAQKDLYRDVMLENYSNLVS | WQFLSPAQKDLYRDVMLENY | GACCCTGGAGGACGTGGCCG | |
| | V (SEQ ID NO: 107) | SNLVSVGYQAGKPDALTKLE | TGGACTTCACCTGGGAGGAG | |
| | | QGEPLWTLEDEIHSPAHPEI | TGGCAGTTCCTGAGCCCCGC | |
| | | (SEQ ID NO: 108) | CCAGAAGGACCTGTACAGAG | |
| | | | ATGTGATGCTGGAGAACTAC | |
| | | | AGCAACCTGGTGAGCGTGGG | |
| | | | CTACCAGGCCGGCAAGCCCG | |
| | | | ACGCCCTGACCAAGCTGGAG | |
| | | | CAGGGCGAGCCTCTGTGGAC | |
| | | | CCTGGAGGACGAGATCCACA | |
| | | | GCCCCGCCCACCCCGAGATC | |
| | | | (SEQ ID NO: 949) | |
| ZN470 | SVTFTDVAIDFSQDEWEWLN | SQEEVEVAGIKLCKAMSLGS | AGCCAGGAGGAGGTGGAGGT | 7.07241961 |
| | LAQRSLYKKVMLENYRNLVS | VTFTDVAIDFSQDEWEWLNL | GGCCGGCATCAAGCTGTGCA | |
| | V (SEQ ID NO: 109) | AQRSLYKKVMLENYRNLVSV | AGGCCATGAGCCTGGGCAGC | |
| | | GLCISKPDVISLLEQEKDPW | GTGACCTTCACCGACGTGGC | |
| | | (SEQ ID NO: 110) | CATCGACTTCAGCCAGGACG | |
| | | | AGTGGGAGTGGCTGAACCTG | |
| | | | GCCCAGAGAAGCCTGTACAA | |
| | | | GAAGGTGATGCTGGAGAACT | |
| | | | ACAGAAACCTGGTGAGCGTG | |
| | | | GGCCTGTGCATCAGCAAGCC | |
| | | | CGACGTGATCAGCCTGCTGG | |
| | | | AGCAGGAGAAGGACCCCTGG | |
| | | | (SEQ ID NO: 950) | |
| ZN484 | SVSFKDVTVDFSRDEWQQLD | TKSLESVSFKDVTVDFSRDE | ACCAAGAGCCTGGAGAGCGT | 7.07124789 |
| | LAQKSLYREVMLENYFNLIS | WQQLDLAQKSLYREVMLENY | GAGCTTCAAGGACGTGACCG | |
| | V (SEQ ID NO: 111) | FNLISVGCQVPKPEVIFSLE | TGGACTTCAGCAGAGATGAG | |
| | | QEEPCMLDGEIPSQSRPDGD | TGGCAGCAGCTGGACCTGGC | |
| | | (SEQ ID NO: 112) | CCAGAAGAGCCTGTACAGAG | |
| | | | AGGTGATGCTGGAGAACTAC | |
| | | | TTCAACCTGATCAGCGTGGG | |
| | | | CTGCCAGGTGCCCAAGCCCG | |
| | | | AGGTGATCTTCAGCCTGGAG | |
| | | | CAGGAGGAGCCCTGCATGCT | |
| | | | GGACGGCGAGATCCCCAGCC | |
| | | | AGAGCAGACCCGACGGCGAC | |
| | | | (SEQ ID NO: 951) | |
| ZN431 | TLTFRDVAIEFSLEEWECLN | SGCPGAERNLLVYSYFEKET | AGCGGCTGCCCCGGCGCCGA | 7.06946125 |
| | PAQQNLYMNVMLENYKNLVF | LTFRDVAIEFSLEEWECLNP | GAGAAACCTGCTGGTGTACA | |
| | L (SEQ ID NO: 113) | AQQNLYMNVMLENYKNLVFL | GCTACTTCGAGAAGGAGACC | |
| | | GVAVSKQDPVTCLEQEKEPW | CTGACCTTCAGAGATGTGGC | |
| | | (SEQ ID NO: 114) | CATCGAGTTCAGCCTGGAGG | |
| | | | AGTGGGAGTGCCTGAACCCC | |
| | | | GCCCAGCAGAACCTGTACAT | |
| | | | GAACGTGATGCTGGAGAACT | |
| | | | ACAAGAACCTGGTGTTCCTG | |
| | | | GGCGTGGCCGTGAGCAAGCA | |
| | | | GGACCCCGTGACCTGCCTGG | |
| | | | AGCAGGAGAAGGAGCCCTGG | |
| | | | (SEQ ID NO: 952) | |
| ZN382 | SVSFKDVTVDFTQEEWQQLD | PLQGSVSFKDVTVDFTQEEW | CCCCTGCAGGGCAGCGTGAG | 7.06892645 |
| | PAQKALYRDVMLENYCHFVS | QQLDPAQKALYRDVMLENYC | CTTCAAGGACGTGACCGTGG | |
| | V (SEQ ID NO: 115) | HFVSVGFHMAKPDMIRKLEQ | ACTTCACCCAGGAGGAGTGG | |
| | | GEELWTQRIFPSYSYLEEDG | CAGCAGCTGGACCCCGCCCA | |
| | | (SEQ ID NO: 116) | GAAGGCCCTGTACAGAGATG | |
| | | | TGATGCTGGAGAACTACTGC | |
| | | | CACTTCGTGAGCGTGGGCTT | |
| | | | CCACATGGCCAAGCCCGACA | |
| | | | TGATCAGAAAGCTGGAGCAG | |
| | | | GGCGAGGAGCTGTGGACCCA | |
| | | | GAGAATCTTCCCCAGCTACA | |
| | | | GCTACCTGGAGGAGGACGGC | |
| | | | (SEQ ID NO: 953) | |
| ZN254 | LLTFRDVAIEFSLEEWQHLD | PGPPRSLEMGLLTFRDVAIE | CCCGGCCCCCCCAGAAGCCT | 7.06718937 |
| | IAQQNLYRNVMLENYRNLAF | FSLEEWQHLDIAQQNLYRNV | GGAGATGGGCCTGCTGACCT | |
| | L (SEQ ID NO: 117) | MLENYRNLAFLGIAVSKPDL | TCAGAGATGTGGCCATCGAG | |
| | | ITCLEQGKEPWNMKRHEMVD | TTCAGCCTGGAGGAGTGGCA | |
| | | (SEQ ID NO: 118) | GCACCTGGACATCGCCCAGC | |
| | | | AGAACCTGTACAGAAACGTG | |
| | | | ATGCTGGAGAACTACAGAAA | |
| | | | CCTGGCCTTCCTGGGCATCG | |
| | | | CCGTGAGCAAGCCCGACCTG | |
| | | | ATCACCTGCCTGGAGCAGGG | |
| | | | CAAGGAGCCCTGGAACATGA | |
| | | | AGAGACACGAGATGGTGGAC | |
| | | | (SEQ ID NO: 954) | |
| ZN124 | SVAFEDVAVNFTQEEWALLD | SGHPGSWEMNSVAFEDVAVN | AGCGGCCACCCCGGCAGCTG | 7.0598763 |
| | PSQKNLYRDVMQETFRNLAS | FTQEEWALLDPSQKNLYRDV | GGAGATGAACAGCGTGGCCT | |
| | I (SEQ ID NO: 119) | MQETFRNLASIGNKGEDQSI | TCGAGGACGTGGCCGTGAAC | |
| | | EDQYKNSSRNLRHIISHSGN | TTCACCCAGGAGGAGTGGGC | |
| | | (SEQ ID NO: 120) | CCTGCTGGACCCCAGCCAGA | |
| | | | AGAACCTGTACAGAGATGTG | |
| | | | ATGCAGGAGACCTTCAGAAA | |
| | | | CCTGGCCAGCATCGGCAACA | |
| | | | AGGGCGAGGACCAGAGCATC | |
| | | | GAGGACCAGTACAAGAACAG | |
| | | | CAGCAGAAACCTGAGACACA | |
| | | | TCATCAGCCACAGCGGCAAC | |
| | | | (SEQ ID NO: 955) | |
| ZN607 | SITFGDVAIDFSHQEWEYLS | SYGSITFGDVAIDFSHQEWE | AGCTACGGCAGCATCACCTT | 7.05852729 |
| | LVQKTLYQEVMMENYDNLVS | YLSLVQKTLYQEVMMENYDN | CGGCGACGTGGCCATCGACT | |
| | (SEQ ID NO: 121) | LVSLAGHSVSKPDLITLLEQ | TCAGCCACCAGGAGTGGGAG | |
| | | GKEPWMIVREETRGECTDLD | TACCTGAGCCTGGTGCAGAA | |
| | | (SEQ ID NO: 122) | GACCCTGTACCAGGAGGTGA | |
| | | | TGATGGAGAACTACGACAAC | |
| | | | CTGGTGAGCCTGGCCGGCCA | |
| | | | CAGCGTGAGCAAGCCCGACC | |
| | | | TGATCACCCTGCTGGAGCAG | |
| | | | GGCAAGGAGCCCTGGATGAT | |
| | | | CGTGAGAGAGGAGACCAGAG | |
| | | | GCGAGTGCACCGACCTGGAC | |
| | | | (SEQ ID NO: 956) | |
| ZN317 | SVTFQDVAVDFTEKEWPLLD | DLFVCSGLEPHTPSVGSQES | GACCTGTTCGTGTGCAGCGG | 7.05281313 |
| | SSQRKLYKDVMLENYSNLTS | VTFQDVAVDFTEKEWPLLDS | CCTGGAGCCCCACACCCCCA | |
| | L (SEQ ID NO: 123) | SQRKLYKDVMLENYSNLTSL | GCGTGGGCAGCCAGGAAAGC | |
| | | GYQVGKPSLISHLEQEEEPR | GTGACCTTCCAGGACGTGGC | |
| | | (SEQ ID NO: 124) | CGTGGACTTCACCGAGAAGG | |
| | | | AGTGGCCCCTGCTGGACAGC | |
| | | | AGCCAGAGAAAGCTGTACAA | |
| | | | GGACGTGATGCTGGAGAACT | |
| | | | ACAGCAACCTGACCAGCCTG | |
| | | | GGCTACCAGGTGGGCAAGCC | |
| | | | CAGCCTGATCAGCCACCTGG | |
| | | | AGCAGGAGGAGGAGCCCAGA | |
| | | | (SEQ ID NO: 957) | |
| ZN620 | PVTFEDVAVYFTQNEWASLD | FQTAWRQEPVTFEDVAVYFT | TTCCAGACCGCCTGGAGACA | 7.04082891 |
| | SVQRALYREVMLENYANVAS | QNEWASLDSVQRALYREVML | GGAGCCCGTGACCTTCGAGG | |
| | (SEQ ID NO: 125) | ENYANVASLAFPFTTPVLVS | ACGTGGCCGTGTACTTCACC | |
| | | QLEQGELPWGLDPWEPMGRE | CAGAACGAGTGGGCCAGCCT | |
| | | (SEQ ID NO: 126) | GGACAGCGTGCAGAGAGCCC | |
| | | | TGTACAGAGAGGTGATGCTG | |
| | | | GAGAACTACGCCAACGTGGC | |
| | | | CAGCCTGGCCTTCCCCTTCA | |
| | | | CCACCCCCGTGCTGGTGAGC | |
| | | | CAGCTGGAGCAGGGCGAGCT | |
| | | | GCCCTGGGGACTGGACCCCT | |
| | | | GGGAGCCTATGGGCAGAGAG | |
| | | | (SEQ ID NO: 958) | |
| ZN141 | LLTFRDVAIEFSPEEWKCLD | ELLTFRDVAIEFSPEEWKCL | GAGCTGCTGACCTTCAGAGA | 7.03997569 |
| | PDQQNLYRDVMLENYRNLVS | DPDQQNLYRDVMLENYRNLV | TGTGGCCATCGAGTTCAGCC | |
| | L (SEQ ID NO: 127) | SLGVAISNPDLVTCLEQRKE | CCGAGGAGTGGAAGTGCCTG | |
| | | PYNVKIHKIVARPPAMCSHF | GACCCCGACCAGCAGAACCT | |
| | | (SEQ ID NO: 128) | GTACAGAGATGTGATGCTGG | |
| | | | AGAACTACAGAAACCTGGTG | |
| | | | AGCCTGGGCGTGGCCATCAG | |
| | | | CAACCCCGACCTGGTGACCT | |
| | | | GCCTGGAGCAGAGAAAGGAG | |
| | | | CCCTACAACGTGAAGATCCA | |
| | | | CAAGATCGTGGCCAGACCCC | |
| | | | CCGCCATGTGCAGCCACTTC | |
| | | | (SEQ ID NO: 959) | |
| ZN584 | LVMFEDVTVYFSREEWGLLN | AGEAEAQLDPSLQGLVMFED | GCCGGCGAGGCCGAGGCCCA | 7.03820051 |
| | VTQKGLYRDVMLENFALVSS | VTVYFSREEWGLLNVTQKGL | GCTGGACCCCAGCCTGCAGG | |
| | L (SEQ ID NO: 129) | YRDVMLENFALVSSLGLAPS | GCCTGGTTATGTTCGAGGAC | |
| | | RSPVFTQLEDDEQSWVPSWV | GTGACCGTGTACTTCAGCAG | |
| | | (SEQ ID NO: 130) | AGAGGAGTGGGGCCTGCTGA | |
| | | | ACGTGACCCAGAAGGGCCTG | |
| | | | TACAGAGATGTGATGCTGGA | |
| | | | GAACTTCGCCCTGGTGAGCA | |
| | | | GCCTGGGCCTGGCCCCCAGC | |
| | | | AGAAGCCCCGTGTTCACCCA | |
| | | | GCTGGAGGACGACGAGCAGA | |
| | | | GCTGGGTGCCCAGCTGGGTG | |
| | | | (SEQ ID NO: 960) | |
| ZN540 | LVTFRDVAIDFSQKEWECLD | AHALVTFRDVAIDFSQKEWE | GCCCACGCCCTGGTGACCTT | 7.03581318 |
| | TTQRKLYRDVMLENYNNLVS | CLDTTQRKLYRDVMLENYNN | CAGAGATGTGGCCATCGACT | |
| | L (SEQ ID NO: 131) | LVSLGYSGSKPDVITLLEQG | TCAGCCAGAAGGAGTGGGAG | |
| | | KEPCVVARDVTGRQCPGLLS | TGCCTGGACACCACCCAGAG | |
| | | (SEQ ID NO: 132) | AAAGCTGTACAGAGATGTGA | |
| | | | TGCTGGAGAACTACAACAAC | |
| | | | CTGGTGAGCCTGGGCTACAG | |
| | | | CGGCAGCAAGCCCGACGTGA | |
| | | | TCACCCTGCTGGAGCAGGGC | |
| | | | AAGGAGCCCTGCGTGGTGGC | |
| | | | CAGAGATGTGACCGGCAGAC | |
| | | | AGTGCCCCGGCCTGCTGAGC | |
| | | | (SEQ ID NO: 961) | |
| ZN75D | LLTFEDVAVYFSEEEWQLLN | KRIKHWKMASKLILPESLSL | AAGAGAATCAAGCACTGGAA | 7.02809755 |
| | PLEKTLYNDVMQDIYETVIS | LTFEDVAVYFSEEEWQLLNP | GATGGCCAGCAAGCTGATCC | |
| | L (SEQ ID NO: 133) | LEKTLYNDVMQDIYETVISL | TGCCCGAGAGCCTGAGCCTG | |
| | | GLKLKNDTGNDHPISVSTSE | CTGACCTTCGAGGACGTGGC | |
| | | (SEQ ID NO: 134 | CGTGTACTTCAGCGAGGAGG | |
| | | | AGTGGCAGCTGCTGAACCCC | |
| | | | CTGGAGAAGACCCTGTACAA | |
| | | | CGACGTGATGCAGGACATCT | |
| | | | ACGAGACCGTGATCAGCCTG | |
| | | | GGCCTGAAGCTGAAGAACGA | |
| | | | CACCGGCAACGACCACCCCA | |
| | | | TCAGCGTGAGCACCAGCGAG | |
| | | | (SEQ ID NO: 962) | |
| ZN555 | SVVFEDVAVDFTLEEWALLD | DSVVFEDVAVDFTLEEWALL | GACAGCGTGGTGTTCGAGGA | 7.02680391 |
| | SAQRDLYRDVMLETFQNLAS | DSAQRDLYRDVMLETFQNLA | CGTGGCCGTGGACTTCACCC | |
| | V (SEQ ID NO: 135) | SVDDETQFKASGSVSQQDIY | TGGAGGAGTGGGCCCTGCTG | |
| | | GEKIPKESKIATFTRNVSWA | GACAGCGCCCAGAGAGACCT | |
| | | (SEQ ID NO: 136) | GTACAGAGATGTGATGCTGG | |
| | | | AGACCTTCCAGAACCTGGCC | |
| | | | AGCGTGGACGACGAGACCCA | |
| | | | GTTCAAGGCCAGCGGCAGCG | |
| | | | TGAGCCAGCAGGACATCTAC | |
| | | | GGCGAGAAGATCCCCAAGGA | |
| | | | GAGCAAGATCGCCACCTTCA | |
| | | | CCAGAAACGTGAGCTGGGCC | |
| | | | (SEQ ID NO: 963) | |
| ZN658 | SVSFQDVTVEFTREEWQHLG | NMSQASVSFQDVTVEFTREE | AACATGAGCCAGGCCAGCGT | 7.01857786 |
| | PVERTLYRDVMLENYSHLIS | WQHLGPVERTLYRDVMLENY | GAGCTTCCAGGACGTGACCG | |
| | V (SEQ ID NO: 137) | SHLISVGYCITKPKVISKLE | TGGAGTTCACCAGAGAGGAG | |
| | | KGEEPWSLEDEFLNQRYPGY | TGGCAGCACCTGGGCCCCGT | |
| | | (SEQ ID NO: 138) | GGAGAGAACCCTGTACAGAG | |
| | | | ATGTGATGCTGGAGAACTAC | |
| | | | AGCCACCTGATCAGCGTGGG | |
| | | | CTACTGCATCACCAAGCCCA | |
| | | | AGGTGATCAGCAAGCTGGAG | |
| | | | AAGGGCGAGGAGCCCTGGAG | |
| | | | CCTGGAGGACGAGTTCCTGA | |
| | | | ACCAGAGATACCCCGGCTAC | |
| | | | (SEQ ID NO: 964) | |
| ZN684 | SVTFQDVAVDFTAEEWQLLD | ISFQESVTFQDVAVDFTAEE | ATCAGCTTCCAGGAGAGCGT | 7.01522838 |
| | CAERTLYWDVMLENYRNLIS | WQLLDCAERTLYWDVMLENY | GACCTTCCAGGACGTGGCCG | |
| | V (SEQ ID NO: 139) | RNLISVGCPITKTKVILKVE | TGGACTTCACCGCCGAGGAG | |
| | | QGQEPWMVEGANPHESSPES | TGGCAGCTGCTGGACTGCGC | |
| | | (SEQ ID NO: 140) | CGAGAGAACCCTGTACTGGG | |
| | | | ACGTGATGCTGGAGAACTAC | |
| | | | AGAAACCTGATCAGCGTGGG | |
| | | | CTGCCCCATCACCAAGACCA | |
| | | | AGGTGATCCTGAAGGTGGAG | |
| | | | CAGGGCCAGGAGCCCTGGAT | |
| | | | GGTGGAGGGCGCCAACCCCC | |
| | | | ACGAGAGCAGCCCCGAGAGC | |
| | | | (SEQ ID NO: 965) | |
| RBAK | PVSFKDVAVDFTQEEWQQLD | NTLQGPVSFKDVAVDFTQEE | AACACCCTGCAGGGCCCCGT | 7.01040328 |
| | PDEKITYRDVMLENYSHLVS | WQQLDPDEKITYRDVMLENY | GAGCTTCAAGGACGTGGCCG | |
| | V (SEQ ID NO: 141) | SHLVSVGYDTTKPNVIIKLE | TGGACTTCACCCAGGAGGAG | |
| | | QGEEPWIMGGEFPCQHSPEA | TGGCAGCAGCTGGACCCCGA | |
| | | (SEQ ID NO: 142) | CGAGAAGATCACCTACAGAG | |
| | | | ATGTGATGCTGGAGAACTAC | |
| | | | AGCCACCTGGTGAGCGTGGG | |
| | | | CTACGACACCACCAAGCCCA | |
| | | | ACGTGATCATCAAGCTGGAG | |
| | | | CAGGGCGAGGAGCCCTGGAT | |
| | | | CATGGGCGGCGAGTTCCCCT | |
| | | | GCCAGCACAGCCCCGAGGCC | |
| | | | (SEQ ID NO: 966) | |
| ZN829 | PVMFRDVSIDFSQEEWECLD | HPEEEERMHDELLQAVSKGP | CACCCCGAGGAGGAGGAGAG | 7.0012394 |
| | ADQMNLYKEVMLENFSNLVS | VMFRDVSIDFSQEEWECLDA | AATGCACGACGAGCTGCTGC | |
| | V (SEQ ID NO: 143) | DQMNLYKEVMLENFSNLVSV | AGGCCGTGAGCAAGGGCCCC | |
| | | GLSNSKPAVISLLEQGKEPW | GTGATGTTCAGAGATGTGAG | |
| | | (SEQ ID NO: 144) | CATCGACTTCAGCCAGGAGG | |
| | | | AGTGGGAGTGCCTGGACGCC | |
| | | | GACCAGATGAACCTGTACAA | |
| | | | GGAGGTGATGCTGGAGAACT | |
| | | | TCAGCAACCTGGTGAGCGTG | |
| | | | GGCCTGAGCAACAGCAAGCC | |
| | | | CGCCGTGATCAGCCTGCTGG | |
| | | | AGCAGGGCAAGGAGCCCTGG | |
| | | | (SEQ ID NO: 967) | |
| ZN582 | LFRDVAIVFSQEEWQWLAPA | SLGSELFRDVAIVFSQEEWQ | AGCCTGGGCAGCGAGCTGTT | 6.98988925 |
| | QRDLYRDVMLETYSNLVSL | WLAPAQRDLYRDVMLETYSN | CAGAGATGTGGCCATCGTGT | |
| | (SEQ ID NO: 145) | LVSLGLAVSKPDVISFLEQG | TCAGCCAGGAGGAGTGGCAG | |
| | | KEPWMVERVVSGGLCPVLES | TGGCTGGCCCCCGCCCAGAG | |
| | | (SEQ ID NO: 146) | AGACCTGTACAGAGATGTGA | |
| | | | TGCTGGAGACCTACAGCAAC | |
| | | | CTGGTGAGCCTGGGCCTGGC | |
| | | | CGTGAGCAAGCCCGACGTGA | |
| | | | TCAGCTTCCTGGAGCAGGGC | |
| | | | AAGGAGCCCTGGATGGTGGA | |
| | | | GAGAGTGGTGAGCGGCGGCC | |
| | | | TGTGCCCCGTGCTGGAGAGC | |
| | | | (SEQ ID NO: 968) | |
| ZN112 | MVTFKDVAVVFTEEELGLLD | TKFQEMVTFKDVAVVFTEEE | ACCAAGTTCCAGGAGATGGT | 6.98982538 |
| | SVQRKLYRDVMLENFRNLLL | LGLLDSVQRKLYRDVMLENF | GACCTTCAAGGACGTGGCCG | |
| | (SEQ ID NO: 147) | RNLLLVAHQPFKPDLISQLE | TGGTGTTCACCGAGGAGGAG | |
| | | REEKLLMVETETPRDGCSGR | CTGGGCCTGCTGGACAGCGT | |
| | | (SEQ ID NO: 148) | GCAGAGAAAGCTGTACAGAG | |
| | | | ATGTGATGCTGGAGAACTTC | |
| | | | AGAAACCTGCTGCTGGTGGC | |
| | | | CCACCAGCCCTTCAAGCCCG | |
| | | | ACCTGATCAGCCAGCTGGAG | |
| | | | AGAGAGGAGAAGCTGCTGAT | |
| | | | GGTGGAGACCGAGACCCCCA | |
| | | | GAGATGGCTGCAGCGGCAGA | |
| | | | (SEQ ID NO: 969) | |
| ZN716 | LLTFRDIAIEFSLAEWQCLD | AKRPGPPGSREMGLLTFRDI | GCCAAGAGACCCGGCCCCCC | 6.98744382 |
| | HAQQNLYRDVMLENYRNLVS | AIEFSLAEWQCLDHAQQNLY | CGGCAGCAGAGAGATGGGCC | |
| | L (SEQ ID NO: 149) | RDVMLENYRNLVSLGIAVSK | TGCTGACCTTCAGAGACATC | |
| | | PDLITCLEQNKEPQNIKRNE | GCCATCGAGTTCAGCCTGGC | |
| | | (SEQ ID NO: 150) | CGAGTGGCAGTGCCTGGACC | |
| | | | ACGCCCAGCAGAACCTGTAC | |
| | | | AGAGATGTGATGCTGGAGAA | |
| | | | CTACAGAAACCTGGTGAGCC | |
| | | | TGGGCATCGCCGTGAGCAAG | |
| | | | CCCGACCTGATCACCTGCCT | |
| | | | GGAGCAGAACAAGGAGCCCC | |
| | | | AGAACATCAAGAGAAACGAG | |
| | | | (SEQ ID NO: 970) | |
| HKR1 | FVAFRDVAVYFTQEEWRLLS | TCMVHRQTMSCSGAGGITAF | ACCTGCATGGTGCACAGACA | 6.98664414 |
| | PAQRTLHREVMLETYNHLVS | VAFRDVAVYFTQEEWRLLSP | GACCATGAGCTGCAGGGGGG | |
| | L (SEQ ID NO: 151) | AQRTLHREVMLETYNHLVSL | GGGGGGCATCACCGCCTTCG | |
| | | EIPSSKPKLIAQLERGEAPW | TGGCCTTCAGAGATGTGGCC | |
| | | (SEQ ID NO: 152) | GTGTACTTCACCCAGGAGGA | |
| | | | GTGGAGACTGCTGAGCCCCG | |
| | | | CCCAGAGAACCCTGCACAGA | |
| | | | GAGGTGATGCTGGAGACCTA | |
| | | | CAACCACCTGGTGAGCCTGG | |
| | | | AGATCCCCAGCAGCAAGCCC | |
| | | | AAGCTGATCGCCCAGCTGGA | |
| | | | GAGAGGCGAGGCCCCCTGG | |
| | | | (SEQ ID NO: 971) | |
| ZN350 | SITLEDVAVDFTWEEWQLLG | IQAQESITLEDVAVDFTWEE | ATCCAGGCCCAGGAGAGCAT | 6.98636848 |
| | AAQKDLYRDVMLENYSNLVA | WQLLGAAQKDLYRDVMLENY | CACCCTGGAGGACGTGGCCG | |
| | V (SEQ ID NO: 153) | SNLVAVGYQASKPDALFKLE | TGGACTTCACCTGGGAGGAG | |
| | | QGEQLWTIEDGIHSGACSDI | TGGCAGCTGCTGGGCGCCGC | |
| | | (SEQ ID NO: 154) | CCAGAAGGACCTGTACAGAG | |
| | | | ATGTGATGCTGGAGAACTAC | |
| | | | AGCAACCTGGTGGCCGTGGG | |
| | | | CTACCAGGCCAGCAAGCCCG | |
| | | | ACGCCCTGTTCAAGCTGGAG | |
| | | | CAGGGCGAGCAGCTGTGGAC | |
| | | | CATCGAGGACGGCATCCACA | |
| | | | GCGGCGCCTGCAGCGACATC | |
| | | | (SEQ ID NO: 972) | |
| ZN480 | HLTFRDVAIEFSQAEWKCLD | AQKRRKRKAKESGMALPQGH | GCCCAGAAGAGAAGAAAGAG | 6.98462693 |
| | PAQRALYKDVMLENYRNLVS | LTFRDVAIEFSQAEWKCLDP | AAAGGCCAAGGAGAGCGGCA | |
| | L (SEQ ID NO: 155) | AQRALYKDVMLENYRNLVSL | TGGCCCTGCCCCAGGGCCAC | |
| | | GISLPDLNINSMLEQRREPW | CTGACCTTCAGAGATGTGGC | |
| | | (SEQ ID NO: 156) | CATCGAGTTCAGCCAGGCCG | |
| | | | AGTGGAAGTGCCTGGACCCC | |
| | | | GCCCAGAGAGCCCTGTACAA | |
| | | | GGACGTGATGCTGGAGAACT | |
| | | | ACAGAAACCTGGTGAGCCTG | |
| | | | GGCATCAGCCTGCCCGACCT | |
| | | | GAACATCAACAGCATGCTGG | |
| | | | AGCAGAGAAGAGAGCCCTGG | |
| | | | (SEQ ID NO: 973) | |
| ZN416 | CVTFEDVAIYFSQEEWGLLD | DSTSVPVTAEAKLMGFTQGC | GACAGCACCAGCGTGCCCGT | 6.97472813 |
| | EAQRLLYRDVMLENFALITA | VTFEDVAIYFSQEEWGLLDE | GACCGCCGAGGCCAAGCTGA | |
| | (SEQ ID NO: 157) | AQRLLYRDVMLENFALITAL | TGGGCTTCACCCAGGGCTGC | |
| | | VCWHGMEDEETPEQSVSVEG | GTGACCTTCGAGGACGTGGC | |
| | | (SEQ ID NO: 158) | CATCTACTTCAGCCAGGAGG | |
| | | | AGTGGGGCCTGCTGGACGAG | |
| | | | GCCCAGAGACTGCTGTACAG | |
| | | | AGATGTGATGCTGGAGAACT | |
| | | | TCGCCCTGATCACCGCCCTG | |
| | | | GTGTGCTGGCACGGCATGGA | |
| | | | GGACGAGGAGACCCCCGAGC | |
| | | | AGAGCGTGAGCGTGGAGGGC | |
| | | | (SEQ ID NO: 974) | |
| ZNF92 | PLTFRDVKIEFSLEEWQCLD | GPLTFRDVKIEFSLEEWQCL | GGCCCCCTGACCTTCAGAGA | 6.97138149 |
| | TAQRNLYRDVMLENYRNLVF | DTAQRNLYRDVMLENYRNLV | TGTGAAGATCGAGTTCAGCC | |
| | L (SEQ ID NO: 159) | FLGIAVSKPDLITWLEQGKE | TGGAGGAGTGGCAGTGCCTG | |
| | | PWNLKRHEMVDKTPVMCSHF | GACACCGCCCAGAGAAACCT | |
| | | (SEQ ID NO: 160) | GTACAGAGATGTGATGCTGG | |
| | | | AGAACTACAGAAACCTGGTG | |
| | | | TTCCTGGGCATCGCCGTGAG | |
| | | | CAAGCCCGACCTGATCACCT | |
| | | | GGCTGGAGCAGGGCAAGGAG | |
| | | | CCCTGGAACCTGAAGAGACA | |
| | | | CGAGATGGTGGACAAGACCC | |
| | | | CCGTGATGTGCAGCCACTTC | |
| | | | (SEQ ID NO: 975) | |
| ZN100 | PLTFRDVAIEFSLEEWQCLD | SGCPGAERSLLVQSYFEKGP | AGCGGCTGCCCCGGCGCCGA | 6.9692141 |
| | SAQQGLYRKVMLENYRNLVF | LTFRDVAIEFSLEEWQCLDS | GAGAAGCCTGCTGGTGCAGA | |
| | (SEQ ID NO: 161) | AQQGLYRKVMLENYRNLVFL | GCTACTTCGAGAAGGGCCCC | |
| | | AGIALTKPDLITCLEQGKEP | CTGACCTTCAGAGATGTGGC | |
| | | (SEQ ID NO: 162) | CATCGAGTTCAGCCTGGAGG | |
| | | | AGTGGCAGTGCCTGGACAGC | |
| | | | GCCCAGCAGGGCCTGTACAG | |
| | | | AAAGGTGATGCTGGAGAACT | |
| | | | ACAGAAACCTGGTGTTCCTG | |
| | | | GCCGGCATCGCCCTGACCAA | |
| | | | GCCCGACCTGATCACCTGCC | |
| | | | TGGAGCAGGGCAAGGAGCCC | |
| | | | (SEQ ID NO: 976) | |
| ZN736 | VLTFRDVAVEFSPEEWECLD | GVLTFRDVAVEFSPEEWECL | GGCGTGCTGACCTTCAGAGA | 6.95843452 |
| | SAQQRLYRDVMLENYGNLVS | DSAQQRLYRDVMLENYGNLV | TGTGGCCGTGGAGTTCAGCC | |
| | L (SEQ ID NO: 163) | SLGLAIFKPDLMTCLEQRKE | CCGAGGAGTGGGAGTGCCTG | |
| | | PWKVKRQEAVAKHPAGSFHF | GACAGCGCCCAGCAGAGACT | |
| | | (SEQ ID NO: 164) | GTACAGAGATGTGATGCTGG | |
| | | | AGAACTACGGCAACCTGGTG | |
| | | | AGCCTGGGCCTGGCCATCTT | |
| | | | CAAGCCCGACCTGATGACCT | |
| | | | GCCTGGAGCAGAGAAAGGAG | |
| | | | CCCTGGAAGGTGAAGAGACA | |
| | | | GGAGGCCGTGGCCAAGCACC | |
| | | | CCGCCGGCAGCTTCCACTTC | |
| | | | (SEQ ID NO: 977) | |
| ZNF74 | SVSFKDVAVDFTQEEWGQLD | KENLEDISGWGLPEARSKES | AAGGAGAACCTGGAGGACAT | 6.95809395 |
| | SPQRALYRDVMLENYQNLLA | VSFKDVAVDFTQEEWGQLDS | CAGCGGCTGGGGCCTGCCCG | |
| | L (SEQ ID NO: 165) | PQRALYRDVMLENYQNLLAL | AGGCCAGAAGCAAGGAGAGC | |
| | | GPPLHKPDVISHLERGEEPW | GTGAGCTTCAAGGACGTGGC | |
| | | (SEQ ID NO: 166) | CGTGGACTTCACCCAGGAGG | |
| | | | AGTGGGGCCAGCTGGACAGC | |
| | | | CCCCAGAGAGCCCTGTACAG | |
| | | | AGATGTGATGCTGGAGAACT | |
| | | | ACCAGAACCTGCTGGCCCTG | |
| | | | GGCCCCCCCCTGCACAAGCC | |
| | | | CGACGTGATCAGCCACCTGG | |
| | | | AGAGAGGCGAGGAGCCCTGG | |
| | | | (SEQ ID NO: 978) | |
| CBX1 | EPERIIGATDSSGELMFLMK | EESEKPRGFARGLEPERIIG | GAGGAGAGCGAGAAGCCCAG | 6.95269512 |
| | WKNSDEADLVPAKEANVKCP | ATDSSGELMFLMKWKNSDEA | AGGCTTCGCCAGAGGCCTGG | |
| | QVVISFYEERLT | DLVPAKEANVKCPQVVISFY | AGCCCGAGAGAATCATCGGC | |
| | (SEQ ID NO: 167) | EERLTWHSYPSEDDDKKDDK | GCCACCGACAGCAGCGGCGA | |
| | | (SEQ ID NO: 168) | GCTGATGTTCCTGATGAAGT | |
| | | | GGAAGAACAGCGACGAGGCC | |
| | | | GACCTGGTGCCCGCCAAGGA | |
| | | | GGCCAACGTGAAGTGCCCCC | |
| | | | AGGTGGTGATCAGCTTCTAC | |
| | | | GAGGAGAGACTGACCTGGCA | |
| | | | CAGCTACCCCAGCGAGGACG | |
| | | | ACGACAAGAAGGACGACAAG | |
| | | | (SEQ ID NO: 979) | |
| ZN443 | SVALEDVAVNFTREEWALLG | ASVALEDVAVNFTREEWALL | GCCAGCGTGGCCCTGGAGGA | 6.94561303 |
| | PCQKNLYKDVMQETIRNLDC | GPCQKNLYKDVMQETIRNLD | CGTGGCCGTGAACTTCACCA | |
| | (SEQ ID NO: 169) | CVVMKWKDQNIEDQYRYPRK | GAGAGGAGTGGGCCCTGCTG | |
| | | NLRCRMLERFVESKDGTQCG | GGCCCCTGCCAGAAGAACCT | |
| | | (SEQIDNO:170) | GTACAAGGACGTGATGCAGG | |
| | | | AGACCATCAGAAACCTGGAC | |
| | | | TGCGTGGTGATGAAGTGGAA | |
| | | | GGACCAGAACATCGAGGACC | |
| | | | AGTACAGATACCCCAGAAAG | |
| | | | AACCTGAGATGCAGAATGCT | |
| | | | GGAGAGATTCGTGGAGAGCA | |
| | | | AGGACGGCACCCAGTGCGGC | |
| | | | (SEQ ID NO: 980) | |
| ZN195 | LLTFRDVAIEFSLEEWKCLD | TLLTFRDVAIEFSLEEWKCL | ACCCTGCTGACCTTCAGAGA | 6.9432522 |
| | LAQQNLYRDVMLENYRNLFS | DLAQQNLYRDVMLENYRNLF | TGTGGCCATCGAGTTCAGCC | |
| | V (SEQ ID NO: 171) | SVGLTVCKPGLITCLEQRKE | TGGAGGAGTGGAAGTGCCTG | |
| | | PWNVKRQEAADGHPEMGFHH | GACCTGGCCCAGCAGAACCT | |
| | | (SEQ ID NO: 172) | GTACAGAGATGTGATGCTGG | |
| | | | AGAACTACAGAAACCTGTTC | |
| | | | AGCGTGGGCCTGACCGTGTG | |
| | | | CAAGCCCGGCCTGATCACCT | |
| | | | GCCTGGAGCAGAGAAAGGAG | |
| | | | CCCTGGAACGTGAAGAGACA | |
| | | | GGAGGCCGCCGACGGCCACC | |
| | | | CCGAGATGGGCTTCCACCAC | |
| | | | (SEQ ID NO: 981) | |
| ZN530 | FVAFEDVAIYFSQEEWELLD | AAALRAPTQQVFVAFEDVAI | GCCGCCGCCCTGAGAGCCCC | 6.94292737 |
| | EMQRLLYRDVMLENFAVMAS | YFSQEEWELLDEMQRLLYRD | CACCCAGCAGGTGTTCGTGG | |
| | L (SEQ ID NO: 173) | VMLENFAVMASLGCWCGAVD | CCTTCGAGGACGTGGCCATC | |
| | | EGTPSAESVSVEELSQGRTP | TACTTCAGCCAGGAGGAGTG | |
| | | (SEQ ID NO: 174) | GGAGCTGCTGGACGAGATGC | |
| | | | AGAGACTGCTGTACAGAGAT | |
| | | | GTGATGCTGGAGAACTTCGC | |
| | | | CGTGATGGCCAGCCTGGGCT | |
| | | | GCTGGTGCGGCGCCGTGGAC | |
| | | | GAGGGAACACCTAGCGCCGA | |
| | | | GAGCGTGAGCGTGGAGGAGC | |
| | | | TGAGCCAGGGCAGAACCCCC | |
| | | | (SEQ ID NO: 982) | |
| ZN782 | SVSFQDVTVEFSQEEWQHMG | NTFQASVSFQDVTVEFSQEE | AACACCTTCCAGGCCAGCGT | 6.94217051 |
| | PVERTLYRDVMLENYSHLVS | WQHMGPVERTLYRDVMLENY | GAGCTTCCAGGACGTGACCG | |
| | V (SEQ ID NO: 175) | SHLVSVGYCFTKPELIFTLE | TGGAGTTCAGCCAGGAGGAG | |
| | | QGEDPWLLEKEKGFLSRNSP | TGGCAGCACATGGGCCCCGT | |
| | | (SEQ ID NO: 176) | GGAGAGAACCCTGTACAGAG | |
| | | | ATGTGATGCTGGAGAACTAC | |
| | | | AGCCACCTGGTGAGCGTGGG | |
| | | | CTACTGCTTCACCAAGCCCG | |
| | | | AGCTGATCTTCACCCTGGAG | |
| | | | CAGGGCGAGGACCCCTGGCT | |
| | | | GCTGGAGAAGGAGAAGGGCT | |
| | | | TCCTGAGCAGAAACAGCCCC | |
| | | | (SEQ ID NO: 983) | |
| ZN791 | SVAFEDVSVSFSQEEWALLA | DSVAFEDVSVSFSQEEWALL | GACAGCGTGGCCTTCGAGGA | 6.93320479 |
| | PSQKKLYRDVMQETFKNLAS | APSQKKLYRDVMQETFKNLA | CGTGAGCGTGAGCTTCAGCC | |
| | I (SEQ ID NO: 177) | SIGEKWEDPNVEDQHKNQGR | AGGAGGAGTGGGCCCTGCTG | |
| | | NLRSHTGERLCEGKEGSQCA | GCCCCCAGCCAGAAGAAGCT | |
| | | (SEQ ID NO: 178) | GTACAGAGATGTGATGCAGG | |
| | | | AGACCTTCAAGAACCTGGCC | |
| | | | AGCATCGGCGAGAAGTGGGA | |
| | | | GGACCCCAACGTGGAGGACC | |
| | | | AGCACAAGAACCAGGGCAGA | |
| | | | AACCTGAGAAGCCACACCGG | |
| | | | CGAGAGACTGTGCGAGGGCA | |
| | | | AGGAGGGCAGCCAGTGCGCC | |
| | | | (SEQ ID NO: 984) | |
| ZN331 | LVTFADVAIDFSQEEWACLN | AQGLVTFADVAIDFSQEEWA | GCCCAGGGCCTGGTGACCTT | 6.92979428 |
| | SAQRDLYWDVMLENYSNLVS | CLNSAQRDLYWDVMLENYSN | CGCCGACGTGGCCATCGACT | |
| | L (SEQ ID NO: 179) | LVSLDLESAYENKSLPTEKN | TCAGCCAGGAGGAGTGGGCC | |
| | | IHEIRASKRNSDRRSKSLGR | TGCCTGAACAGCGCCCAGAG | |
| | | (SEQ ID NO: 180) | AGACCTGTACTGGGACGTGA | |
| | | | TGCTGGAGAACTACAGCAAC | |
| | | | CTGGTGAGCCTGGACCTGGA | |
| | | | GAGCGCCTACGAGAACAAGA | |
| | | | GCCTGCCCACCGAGAAGAAC | |
| | | | ATCCACGAGATCAGAGCCAG | |
| | | | CAAGAGAAACAGCGACAGAA | |
| | | | GAAGCAAGAGCCTGGGCAGA | |
| | | | (SEQ ID NO: 985) | |
| Z354C | PVTFRDVAVFFSQDEWLHLD | AVDLLSAQEPVTFRDVAVFF | GCCGTGGACCTGCTGAGCGC | 6.92855271 |
| | SAQRALYREVMLENYSSLVS | SQDEWLHLDSAQRALYREVM | CCAGGAGCCCGTGACCTTCA | |
| | L (SEQ ID NO: 181) | LENYSSLVSLGIPFSMPKLI | GAGATGTGGCCGTGTTCTTC | |
| | | HQLQQGEDPCMVEREVPSDT | AGCCAGGACGAGTGGCTGCA | |
| | | (SEQ ID NO: 182) | CCTGGACAGCGCCCAGAGAG | |
| | | | CCCTGTACAGAGAGGTGATG | |
| | | | CTGGAGAACTACAGCAGCCT | |
| | | | GGTGAGCCTGGGCATCCCCT | |
| | | | TCAGCATGCCCAAGCTGATC | |
| | | | CACCAGCTGCAGCAGGGCGA | |
| | | | GGACCCCTGCATGGTGGAGA | |
| | | | GAGAGGTGCCCAGCGACACC | |
| | | | (SEQ ID NO: 986) | |
| ZN157 | SVSFEDVAVDFTRQEWHRLD | SPQRFPALIPGEPGRSFEGS | AGCCCCCAGAGATTCCCCGC | 6.92764017 |
| | PAQRTMHKDVMLETYSNLAS | VSFEDVAVDFTRQEWHRLDP | CCTGATCCCCGGCGAGCCCG | |
| | V (SEQ ID NO: 183) | AQRTMHKDVMLETYSNLASV | GCAGAAGCTTCGAGGGCAGC | |
| | | GLCVAKPEMIFKLERGEELW | GTGAGCTTCGAGGACGTGGC | |
| | | (SEQ ID NO: 184) | CGTGGACTTCACCAGACAGG | |
| | | | AGTGGCACAGACTGGACCCC | |
| | | | GCCCAGAGAACCATGCACAA | |
| | | | GGACGTGATGCTGGAGACCT | |
| | | | ACAGCAACCTGGCCAGCGTG | |
| | | | GGCCTGTGCGTGGCCAAGCC | |
| | | | CGAGATGATCTTCAAGCTGG | |
| | | | AGAGAGGCGAGGAGCTGTGG | |
| | | | (SEQ ID NO: 987) | |
| ZN727 | VLTFRDVAVEFSPEEWECLD | RVLTFRDVAVEFSPEEWECL | AGAGTGCTGACCTTCAGAGA | 6.9257026 |
| | SAQQRLYRDVMLENYGNLFS | DSAQQRLYRDVMLENYGNLF | TGTGGCCGTGGAGTTCAGCC | |
| | L (SEQ ID NO: 185) | SLGLAIFKPDLITYLEQRKE | CCGAGGAGTGGGAGTGCCTG | |
| | | PWNARRQKTVAKHPAGSLHF | GACAGCGCCCAGCAGAGACT | |
| | | (SEQ ID NO: 186) | GTACAGAGATGTGATGCTGG | |
| | | | AGAACTACGGCAACCTGTTC | |
| | | | AGCCTGGGCCTGGCCATCTT | |
| | | | CAAGCCCGACCTGATCACCT | |
| | | | ACCTGGAGCAGAGAAAGGAG | |
| | | | CCCTGGAACGCCAGAAGACA | |
| | | | GAAGACCGTGGCCAAGCACC | |
| | | | CCGCCGGCAGCCTGCACTTC | |
| | | | (SEQ ID NO: 988) | |
| ZN550 | LVTFKDVAVTFTREEWRQLD | AETKDAAQMLVTFKDVAVTF | GCCGAGACCAAGGACGCCGC | 6.92403295 |
| | LAQRTLYREVMLETCGLLVS | TREEWRQLDLAQRTLYREVM | CCAGATGCTGGTGACCTTCA | |
| | L (SEQ ID NO: 187) | LETCGLLVSLGHRVPKPELV | AGGACGTGGCCGTGACCTTC | |
| | | HLLEHGQELWIVKRGLSHAT | ACCAGAGAGGAGTGGAGACA | |
| | | (SEQ ID NO: 188) | GCTGGACCTGGCCCAGAGAA | |
| | | | CCCTGTACAGAGAGGTGATG | |
| | | | CTGGAGACCTGCGGCCTGCT | |
| | | | GGTGAGCCTGGGCCACAGAG | |
| | | | TGCCCAAGCCCGAGCTGGTG | |
| | | | CACCTGCTGGAGCACGGCCA | |
| | | | GGAGCTGTGGATCGTGAAGA | |
| | | | GAGGCCTGAGCCACGCCACC | |
| | | | (SEQ ID NO: 989) | |
| ZN793 | PVSFKDVVVGFTQEEWHRLS | IEYQIPVSFKDVVVGFTQEE | ATCGAGTACCAGATCCCCGT | 6.92326085 |
| | PAQRALYRDVMLETYSNLVS | WHRLSPAQRALYRDVMLETY | GAGCTTCAAGGACGTGGTGG | |
| | V (SEQ ID NO: 189) | SNLVSVGYEGTKPDVILRLE | TGGGCTTCACCCAGGAGGAG | |
| | | QEEAPWIGEAACPGCHCWED | TGGCACAGACTGAGCCCCGC | |
| | | (SEQ ID NO: 190) | CCAGAGAGCCCTGTACAGAG | |
| | | | ATGTGATGCTGGAGACCTAC | |
| | | | AGCAACCTGGTGAGCGTGGG | |
| | | | CTACGAGGGCACCAAGCCCG | |
| | | | ACGTGATCCTGAGACTGGAG | |
| | | | CAGGAGGAGGCCCCCTGGAT | |
| | | | CGGCGAGGCCGCTTGCCCTG | |
| | | | GATGCCACTGCTGGGAGGAC | |
| | | | (SEQ ID NO: 990) | |
| ZN235 | AVTFKDVAVAFTEEELGLLD | TKFQEAVTFKDVAVAFTEEE | ACCAAGTTCCAGGAGGCCGT | 6.91826902 |
| | SAQRKLYRDVMLENFRNLVS | LGLLDSAQRKLYRDVMLENF | GACCTTCAAGGACGTGGCCG | |
| | V (SEQ ID NO: 191) | RNLVSVGHQSFKPDMISQLE | TGGCCTTCACCGAGGAGGAG | |
| | | REEKLWMKELQTQRGKHSGD | CTGGGCCTGCTGGACAGCGC | |
| | | (SEQ ID NO: 192) | CCAGAGAAAGCTGTACAGAG | |
| | | | ATGTGATGCTGGAGAACTTC | |
| | | | AGAAACCTGGTGAGCGTGGG | |
| | | | CCACCAGAGCTTCAAGCCCG | |
| | | | ACATGATCAGCCAGCTGGAG | |
| | | | AGAGAGGAGAAGCTGTGGAT | |
| | | | GAAGGAGCTGCAGACCCAGA | |
| | | | GAGGCAAGCACAGCGGCGAC | |
| | | | (SEQ ID NO: 991) | |
| ZNF8 | PVTFRDVAVDFTQEEWGQLD | DEGVAGVMSVGPPAARLQEP | GACGAGGGCGTGGCCGGCGT | 6.91722882 |
| | PTQRILYRDVMLETFGHLLS | VTFRDVAVDFTQEEWGQLDP | GATGAGCGTGGGCCCCCCCG | |
| | I (SEQ ID NO: 193) | TQRILYRDVMLETFGHLLSI | CTGCTAGACTTCAGGAGCCC | |
| | | GPELPKPEVISQLEQGTELW | GTGACCTTCAGAGATGTGGC | |
| | | (SEQ ID NO: 194) | CGTGGACTTCACCCAGGAGG | |
| | | | AGTGGGGCCAGCTGGACCCC | |
| | | | ACCCAGAGAATCCTGTACAG | |
| | | | AGATGTGATGCTGGAGACCT | |
| | | | TCGGCCACCTGCTGAGCATC | |
| | | | GGCCCCGAGCTGCCCAAGCC | |
| | | | CGAGGTGATCAGCCAGCTGG | |
| | | | AGCAGGGCACCGAGCTGTGG | |
| | | | (SEQ ID NO: 992) | |
| ZN724 | PLTFMDVAIEFSVEEWQCLD | GPLTFMDVAIEFSVEEWQCL | GGCCCCCTGACCTTCATGGA | 6.89904065 |
| | TAQQNLYRNVMLENYRNLVF | DTAQQNLYRNVMLENYRNLV | CGTGGCCATCGAGTTCAGCG | |
| | L (SEQ ID NO: 195) | FLGIAVSKPDLITCLEQGKE | TGGAGGAGTGGCAGTGCCTG | |
| | | PWNMERHEMVAKPPGMCCYF | GACACCGCCCAGCAGAACCT | |
| | | (SEQ ID NO: 196) | GTACAGAAACGTGATGCTGG | |
| | | | AGAACTACAGAAACCTGGTG | |
| | | | TTCCTGGGCATCGCCGTGAG | |
| | | | CAAGCCCGACCTGATCACCT | |
| | | | GCCTGGAGCAGGGCAAGGAG | |
| | | | CCCTGGAACATGGAGAGACA | |
| | | | CGAGATGGTGGCCAAGCCCC | |
| | | | CCGGCATGTGCTGCTACTTC | |
| | | | (SEQ ID NO: 993) | |
| ZN573 | LVTFRDVAIDFSRQEWEYLD | HQVGLIRSYNSKTMTCFQEL | CACCAGGTGGGCCTGATCAG | 6.89366942 |
| | PNQRDLYRDVMLENYRNLVS | VTFRDVAIDFSRQEWEYLDP | AAGCTACAACAGCAAGACCA | |
| | L (SEQ ID NO: 197) | NQRDLYRDVMLENYRNLVSL | TGACCTGCTTCCAGGAGCTG | |
| | | GGHSISKPVVVDLLERGKEP | GTGACCTTCAGAGATGTGGC | |
| | | (SEQ ID NO: 198) | CATCGACTTCAGCAGACAGG | |
| | | | AGTGGGAGTACCTGGACCCC | |
| | | | AACCAGAGAGACCTGTACAG | |
| | | | AGATGTGATGCTGGAGAACT | |
| | | | ACAGAAACCTGGTGAGCCTG | |
| | | | GGCGGCCACAGCATCAGCAA | |
| | | | GCCCGTGGTGGTGGACCTGC | |
| | | | TGGAGAGAGGCAAGGAGCCC | |
| | | | (SEQ ID NO: 994) | |
| ZN577 | SLSFEDVAVGFTREEWQFLD | NATIVMSVRREQGSSSGEGS | AACGCCACCATCGTGATGAG | 6.89093009 |
| | QSQKVLYKEVMLENYINLVS | LSFEDVAVGFTREEWQFLDQ | CGTGAGAAGAGAGCAGGGCA | |
| | I (SEQ ID NO: 199) | SQKVLYKEVMLENYINLVSI | GCAGCAGCGGCGAGGGCAGC | |
| | | GYRGTKPDSLFKLEQGEPPG | CTGAGCTTCGAGGACGTGGC | |
| | | (SEQ ID NO: 200) | CGTGGGCTTCACCAGAGAGG | |
| | | | AGTGGCAGTTCCTGGACCAG | |
| | | | AGCCAGAAGGTGCTGTACAA | |
| | | | GGAGGTGATGCTGGAGAACT | |
| | | | ACATCAACCTGGTGAGCATC | |
| | | | GGCTACAGAGGCACCAAGCC | |
| | | | CGACAGCCTGTTCAAGCTGG | |
| | | | AGCAGGGCGAGCCCCCCGGC | |
| | | | (SEQ ID NO: 995) | |
| ZN789 | LLSFEDVAMYFTREEWGHLN | FPPARGKELLSFEDVAMYFT | TTCCCCCCCGCCAGAGGCAA | 6.88877268 |
| | WGQKDLYRDVMLENYRNMVL | REEWGHLNWGQKDLYRDVML | GGAGCTGCTGAGCTTCGAGG | |
| | L (SEQ ID NO: 201) | ENYRNMVLLGFQFPKPEMIC | ACGTGGCCATGTACTTCACC | |
| | | QLENWDEQWILDLPRTGNRK | AGAGAGGAGTGGGGCCACCT | |
| | | (SEQ ID NO: 202) | GAACTGGGGCCAGAAGGACC | |
| | | | TGTACAGAGATGTGATGCTG | |
| | | | GAGAACTACAGAAACATGGT | |
| | | | GCTGCTGGGCTTCCAGTTCC | |
| | | | CCAAGCCCGAGATGATCTGC | |
| | | | CAGCTGGAGAACTGGGACGA | |
| | | | GCAGTGGATCCTGGACCTGC | |
| | | | CCAGAACCGGCAACAGAAAG | |
| | | | (SEQ ID NO: 996) | |
| ZN718 | LLTFKDVAIEFSPEEWKCLD | ELLTFKDVAIEFSPEEWKCL | GAGCTGCTGACCTTCAAGGA | 6.87598723 |
| | TSQQNLYRDVMLENYRNLVS | DTSQQNLYRDVMLENYRNLV | CGTGGCCATCGAGTTCAGCC | |
| | L (SEQ ID NO: 203) | SLGVSISNPDLVTSLEQRKE | CCGAGGAGTGGAAGTGCCTG | |
| | | PYNLKIHETAARPPAVCSHF | GACACCAGCCAGCAGAACCT | |
| | | (SEQ ID NO: 204) | GTACAGAGATGTGATGCTGG | |
| | | | AGAACTACAGAAACCTGGTG | |
| | | | AGCCTGGGCGTGAGCATCAG | |
| | | | CAACCCCGACCTGGTGACCA | |
| | | | GCCTGGAGCAGAGAAAGGAG | |
| | | | CCCTACAACCTGAAGATCCA | |
| | | | CGAGACCGCCGCCAGACCCC | |
| | | | CCGCCGTGTGCAGCCACTTC | |
| | | | (SEQ ID NO: 997) | |
| ZN300 | LVSFKDVAVDFTQEEWQQLD | MKSQGLVSFKDVAVDFTQEE | ATGAAGAGCCAGGGCCTGGT | 6.87019452 |
| | PSQRTLYRDVMLENYSHLVS | WQQLDPSQRTLYRDVMLENY | GAGCTTCAAGGACGTGGCCG | |
| | M (SEQ ID NO: 205) | SHLVSMGYPVSKPDVISKLE | TGGACTTCACCCAGGAGGAG | |
| | | QGEEPWIIKGDISNWIYPDE | TGGCAGCAGCTGGACCCCAG | |
| | | (SEQ ID NO: 206) | CCAGAGAACCCTGTACAGAG | |
| | | | ATGTGATGCTGGAGAACTAC | |
| | | | AGCCACCTGGTGAGCATGGG | |
| | | | CTACCCCGTGAGCAAGCCCG | |
| | | | ACGTGATCAGCAAGCTGGAG | |
| | | | CAGGGCGAGGAGCCCTGGAT | |
| | | | CATCAAGGGCGACATCAGCA | |
| | | | ACTGGATCTACCCCGACGAG | |
| | | | (SEQ ID NO: 998) | |
| ZN383 | SVMFSDVSIDFSQEEWDCLD | AEGSVMFSDVSIDFSQEEWD | GCCGAGGGCAGCGTGATGTT | 6.86203801 |
| | PVQRDLYRDVMLENYGNLVS | CLDPVQRDLYRDVMLENYGN | CAGCGACGTGAGCATCGACT | |
| | M (SEQ ID NO: 207) | LVSMGLYTPKPQVISLLEQG | TCAGCCAGGAGGAGTGGGAC | |
| | | KEPWMVGRELTRGLCSDLES | TGCCTGGACCCCGTGCAGAG | |
| | | (SEQ ID NO: 208) | AGACCTGTACAGAGATGTGA | |
| | | | TGCTGGAGAACTACGGCAAC | |
| | | | CTGGTGAGCATGGGCCTGTA | |
| | | | CACCCCCAAGCCCCAGGTGA | |
| | | | TCAGCCTGCTGGAGCAGGGC | |
| | | | AAGGAGCCCTGGATGGTGGG | |
| | | | CAGAGAGCTGACCAGAGGCC | |
| | | | TGTGCAGCGACCTGGAGAGC | |
| | | | (SEQ ID NO: 999) | |
| ZN429 | PLTFTDVAIEFSLEEWQCLD | GPLTFTDVAIEFSLEEWQCL | GGCCCCCTGACCTTCACCGA | 6.85768103 |
| | TAQQNLYRNVMLENYRNLVF | DTAQQNLYRNVMLENYRNLV | CGTGGCCATCGAGTTCAGCC | |
| | L (SEQ ID NO: 209) | FLGIAVSKPDLITCLEKEKE | TGGAGGAGTGGCAGTGCCTG | |
| | | PCKMKRHEMVDEPPVVCSHF | GACACCGCCCAGCAGAACCT | |
| | | (SEQ ID NO: 210) | GTACAGAAACGTGATGCTGG | |
| | | | AGAACTACAGAAACCTGGTG | |
| | | | TTCCTGGGCATCGCCGTGAG | |
| | | | CAAGCCCGACCTGATCACCT | |
| | | | GCCTGGAGAAGGAGAAGGAG | |
| | | | CCCTGCAAGATGAAGAGACA | |
| | | | CGAGATGGTGGACGAGCCCC | |
| | | | CCGTGGTGTGCAGCCACTTC | |
| | | | (SEQ ID NO: 1000) | |
| ZN677 | LFTFKDVAIEFSQEEWECLD | ALSQGLFTFKDVAIEFSQEE | GCCCTGAGCCAGGGCCTGTT | 6.85440091 |
| | PAQRALYRDVMLENYRNLLS | WECLDPAQRALYRDVMLENY | CACCTTCAAGGACGTGGCCA | |
| | L (SEQ ID NO: 211) | RNLLSLDEDNIPPEDDISVG | TCGAGTTCAGCCAGGAGGAG | |
| | | FTSKGLSPKENNKEELYHLV | TGGGAGTGCCTGGACCCCGC | |
| | | (SEQ ID NO: 212) | CCAGAGAGCCCTGTACAGAG | |
| | | | ATGTGATGCTGGAGAACTAC | |
| | | | AGAAACCTGCTGAGCCTGGA | |
| | | | CGAGGACAACATCCCCCCCG | |
| | | | AGGACGACATCAGCGTGGGC | |
| | | | TTCACCAGCAAGGGCCTGAG | |
| | | | CCCCAAGGAGAACAACAAGG | |
| | | | AGGAGCTGTACCACCTGGTG | |
| | | | (SEQ ID NO: 1001) | |
| ZN850 | LVMFQDLSIDFSQEEWECLD | NMEGLVMFQDLSIDFSQEEW | AACATGGAGGGCCTGGTGAT | 6.85293565 |
| | AAQKDLYRDVMMENYSSLVS | ECLDAAQKDLYRDVMMENYS | GTTCCAGGACCTGAGCATCG | |
| | L (SEQ ID NO: 213) | SLVSLGLSIPKPDVISLLEQ | ACTTCAGCCAGGAGGAGTGG | |
| | | GKEPWMVSRDVLGGWCRDSE | GAGTGCCTGGACGCCGCCCA | |
| | | (SEQ ID NO: 214) | GAAGGACCTGTACAGAGATG | |
| | | | TGATGATGGAGAACTACAGC | |
| | | | AGCCTGGTGAGCCTGGGCCT | |
| | | | GAGCATCCCCAAGCCCGACG | |
| | | | TGATCAGCCTGCTGGAGCAG | |
| | | | GGCAAGGAGCCCTGGATGGT | |
| | | | GAGCAGAGATGTGCTGGGGG | |
| | | | GCTGGTGCAGAGACAGCGAG | |
| | | | (SEQ ID NO: 1002) | |
| ZN454 | SVTFKDVAILFTQEEWGQLS | AVSHLPTMVQESVTFKDVAI | GCCGTGAGCCACCTGCCCAC | 6.8342036 |
| | PAQRALYRDVMLENYSNLVS | LFTQEEWGQLSPAQRALYRD | CATGGTGCAGGAGAGCGTGA | |
| | L (SEQ ID NO: 215) | VMLENYSNLVSLGLLGPKPD | CCTTCAAGGACGTGGCCATC | |
| | | TFSQLEKREVWMPEDTPGGF | CTGTTCACCCAGGAGGAGTG | |
| | | (SEQ ID NO: 216) | GGGCCAGCTGAGCCCCGCCC | |
| | | | AGAGAGCCCTGTACAGAGAT | |
| | | | GTGATGCTGGAGAACTACAG | |
| | | | CAACCTGGTGAGCCTGGGCC | |
| | | | TGCTGGGCCCCAAGCCCGAC | |
| | | | ACCTTCAGCCAGCTGGAGAA | |
| | | | GAGAGAGGTGTGGATGCCCG | |
| | | | AGGACACCCCCGGCGGCTTC | |
| | | | (SEQ ID NO: 1003) | |
| ZN257 | PLTIRDVTVEFSLEEWHCLD | GPLTIRDVTVEFSLEEWHCL | GGCCCCCTGACCATCAGAGA | 6.83044 |
| | TAQQNLYRDVMLENYRNLVF | DTAQQNLYRDVMLENYRNLV | TGTGACCGTGGAGTTCAGCC | |
| | L (SEQ ID NO: 217) | FLGIAVSKPDLITCLEQGKE | TGGAGGAGTGGCACTGCCTG | |
| | | PCNMKRHEMVAKPPVMCSHI | GACACCGCCCAGCAGAACCT | |
| | | (SEQ ID NO: 218) | GTACAGAGATGTGATGCTGG | |
| | | | AGAACTACAGAAACCTGGTG | |
| | | | TTCCTGGGCATCGCCGTGAG | |
| | | | CAAGCCCGACCTGATCACCT | |
| | | | GCCTGGAGCAGGGCAAGGAG | |
| | | | CCCTGCAACATGAAGAGACA | |
| | | | CGAGATGGTGGCCAAGCCCC | |
| | | | CCGTGATGTGCAGCCACATC | |
| | | | (SEQ ID NO: 1004) | |
| ZN264 | SVTFDDVAVTFTKEEWGQLD | AAAVLTDRAQVSVTFDDVAV | GCCGCCGCCGTGCTGACCGA | 6.82889596 |
| | LAQRTLYQEVMLENCGLLVS | TFTKEEWGQLDLAQRTLYQE | CAGAGCCCAGGTGAGCGTGA | |
| | L (SEQ ID NO: 219) | VMLENCGLLVSLGCPVPKAE | CCTTCGACGACGTGGCCGTG | |
| | | LICHLEHGQEPWTRKEDLSQ | ACCTTCACCAAGGAGGAGTG | |
| | | (SEQ ID NO: 220) | GGGCCAGCTGGACCTGGCCC | |
| | | | AGAGAACCCTGTACCAGGAG | |
| | | | GTGATGCTGGAGAACTGCGG | |
| | | | CCTGCTGGTGAGCCTGGGCT | |
| | | | GCCCCGTGCCCAAGGCCGAG | |
| | | | CTGATCTGCCACCTGGAGCA | |
| | | | CGGCCAGGAGCCCTGGACCA | |
| | | | GAAAGGAGGACCTGAGCCAG | |
| | | | (SEQ ID NO: 1005) | |
| ZFP82 | SVMFSDVSIDFSPEEWEYLD | ALRSVMFSDVSIDFSPEEWE | GCCCTGAGAAGCGTGATGTT | 6.82733193 |
| | LEQKDLYRDVMLENYSNLVS | YLDLEQKDLYRDVMLENYSN | CAGCGACGTGAGCATCGACT | |
| | L (SEQ ID NO: 221) | LVSLGCFISKPDVISSLEQG | TCAGCCCCGAGGAGTGGGAG | |
| | | KEPWKVVRKGRRQYPDLETK | TACCTGGACCTGGAGCAGAA | |
| | | (SEQ ID NO: 222) | GGACCTGTACAGAGATGTGA | |
| | | | TGCTGGAGAACTACAGCAAC | |
| | | | CTGGTGAGCCTGGGCTGCTT | |
| | | | CATCAGCAAGCCCGACGTGA | |
| | | | TCAGCAGCCTGGAGCAGGGC | |
| | | | AAGGAGCCCTGGAAGGTGGT | |
| | | | GAGAAAGGGCAGAAGACAGT | |
| | | | ACCCCGACCTGGAGACCAAG | |
| | | | (SEQ ID NO: 1006) | |
| ZFP14 | SVTFRDVAIDFSQEEWEFLD | AHGSVTFRDVAIDFSQEEWE | GCCCACGGCAGCGTGACCTT | 6.81312035 |
| | PAQRDLYRDVMWENYSNFIS | FLDPAQRDLYRDVMWENYSN | CAGAGATGTGGCCATCGACT | |
| | L (SEQ ID NO: 223) | FISLGPSISKPDVITLLDEE | TCAGCCAGGAGGAGTGGGAG | |
| | | RKEPGMVVREGTRRYCPDLE | TTCCTGGACCCCGCCCAGAG | |
| | | (SEQ ID NO: 224) | AGACCTGTACAGAGATGTGA | |
| | | | TGTGGGAGAACTACAGCAAC | |
| | | | TTCATCAGCCTGGGCCCCAG | |
| | | | CATCAGCAAGCCCGACGTGA | |
| | | | TCACCCTGCTGGACGAGGAG | |
| | | | AGAAAGGAGCCCGGCATGGT | |
| | | | GGTGAGAGAGGGCACCAGAA | |
| | | | GATACTGCCCCGACCTGGAG | |
| | | | (SEQ ID NO: 1007) | |
| ZN485 | PLTFGDVAVAFTRIEWRHLD | APRAQIQGPLTFGDVAVAFT | GCCCCCAGAGCCCAGATCCA | 6.81172703 |
| | AAQRALYRDVMLENYGNLVS | RIEWRHLDAAQRALYRDVML | GGGCCCCCTGACCTTCGGCG | |
| | V (SEQ ID NO: 225) | ENYGNLVSVGLLSSKPKLIT | ACGTGGCCGTGGCCTTCACC | |
| | | QLEQGAEPWTEVREAPSGTH | AGAATCGAGTGGAGACACCT | |
| | | (SEQ ID NO: 226) | GGACGCCGCCCAGAGAGCCC | |
| | | | TGTACAGAGATGTGATGCTG | |
| | | | GAGAACTACGGCAACCTGGT | |
| | | | GAGCGTGGGCCTGCTGAGCA | |
| | | | GCAAGCCCAAGCTGATCACC | |
| | | | CAGCTGGAGCAGGGCGCCGA | |
| | | | GCCCTGGACCGAGGTGAGAG | |
| | | | AGGCCCCTAGCGGCACACAC | |
| | | | (SEQ ID NO: 1008) | |
| ZN737 | PLQFRDVAIEFSLEEWHQLD | GPLQFRDVAIEFSLEEWHQL | GGCCCCCTGCAGTTCAGAGA | 6.80882457 |
| | TAQRNLYRNVMLENYRNLVF | DTAQRNLYRNVMLENYRNLV | TGTGGCCATCGAGTTCAGCC | |
| | L (SEQ ID NO: 227) | FLGIVVSKPDLITCLEQGKK | TGGAGGAGTGGCACTGCCTG | |
| | | PLTMKKHEMVANPSVTCSHF | GACACCGCCCAGAGAAACCT | |
| | | (SEQ ID NO: 228) | GTACAGAAACGTGATGCTGG | |
| | | | AGAACTACAGAAACCTGGTG | |
| | | | TTCCTGGGCATCGTGGTGAG | |
| | | | CAAGCCCGACCTGATCACCT | |
| | | | GCCTGGAGCAGGGCAAGAAG | |
| | | | CCCCTGACCATGAAGAAGCA | |
| | | | CGAGATGGTGGCCAACCCCA | |
| | | | GCGTGACCTGCAGCCACTTC | |
| | | | (SEQ ID NO: 1009) | |
| ZNF44 | SVAFEDVAVNFTHEEWALLG | TLPRGQPEVLEWGLPKDQDS | ACCCTGCCCAGAGGCCAGCC | 6.80503304 |
| | PSQKNLYRDVMRETIRNLNC | VAFEDVAVNFTHEEWALLGP | CGAGGTGCTGGAGTGGGGCC | |
| | I (SEQ ID NO: 229) | SQKNLYRDVMRETIRNLNCI | TGCCCAAGGACCAGGACAGC | |
| | | GMKWENQNIDDQHQNLRRNP | GTGGCCTTCGAGGACGTGGC | |
| | | (SEQ ID NO: 230) | CGTGAACTTCACCCACGAGG | |
| | | | AGTGGGCCCTGCTGGGCCCC | |
| | | | AGCCAGAAGAACCTGTACAG | |
| | | | AGATGTGATGAGAGAGACCA | |
| | | | TCAGAAACCTGAACTGCATC | |
| | | | GGCATGAAGTGGGAGAACCA | |
| | | | GAACATCGACGACCAGCACC | |
| | | | AGAACCTGAGAAGAAACCCC | |
| | | | (SEQ ID NO: 1010) | |
| ZN596 | SMTFEDIIVDFTQEEWALLD | PSPDSMTFEDIIVDFTQEEW | CCCAGCCCCGACAGCATGAC | 6.80500309 |
| | TSQRKLFQDVMLENISHLVS | ALLDTSQRKLFQDVMLENIS | CTTCGAGGACATCATCGTGG | |
| | I (SEQ ID NO: 231) | HLVSIGKQLCKSVVLSQLEQ | ACTTCACCCAGGAGGAGTGG | |
| | | VEKLSTQRISLLQGREVGIK | GCCCTGCTGGACACCAGCCA | |
| | | (SEQ ID NO: 232) | GAGAAAGCTGTTCCAGGACG | |
| | | | TGATGCTGGAGAACATCAGC | |
| | | | CACCTGGTGAGCATCGGCAA | |
| | | | GCAGCTGTGCAAGAGCGTGG | |
| | | | TGCTGAGCCAGCTGGAGCAG | |
| | | | GTGGAGAAGCTGAGCACCCA | |
| | | | GAGAATCAGCCTGCTGCAGG | |
| | | | GCAGAGAGGTGGGCATCAAG | |
| | | | (SEQ ID NO: 1011) | |
| ZN565 | LVTFRDVAIEFSLEEWKCLE | EESREIRAGQIVLKAMAQGL | GAGGAGAGCAGAGAGATCAG | 6.80375161 |
| | PAQRDLYREVTLENFGHLAS | VTFRDVAIEFSLEEWKCLEP | AGCCGGCCAGATCGTGCTGA | |
| | L (SEQ ID NO: 233) | AQRDLYREVTLENFGHLASL | AGGCCATGGCCCAGGGCCTG | |
| | | GLSISKPDVVSLLEQGKEPW | GTGACCTTCAGAGATGTGGC | |
| | | (SEQ ID NO: 234) | CATCGAGTTCAGCCTGGAGG | |
| | | | AGTGGAAGTGCCTGGAGCCC | |
| | | | GCCCAGAGAGACCTGTACAG | |
| | | | AGAGGTGACCCTGGAGAACT | |
| | | | TCGGCCACCTGGCCAGCCTG | |
| | | | GGCCTGAGCATCAGCAAGCC | |
| | | | CGACGTGGTGAGCCTGCTGG | |
| | | | AGCAGGGCAAGGAGCCCTGG | |
| | | | (SEQ ID NO: 1012) | |
| ZN543 | SVTFEDVAVTFTQEEWGQLD | AASAQVSVTFEDVAVTFTQE | GCCGCCAGCGCCCAGGTGAG | 6.79786357 |
| | AAQRTLYQEVMLETCGLLMS | EWGQLDAAQRTLYQEVMLET | CGTGACCTTCGAGGACGTGG | |
| | L (SEQ ID NO: 235) | CGLLMSLGCPLFKPELIYQL | CCGTGACCTTCACCCAGGAG | |
| | | DHRQELWMATKDLSQSSYPG | GAGTGGGGCCAGCTGGACGC | |
| | | (SEQ ID NO: 236) | CGCCCAGAGAACCCTGTACC | |
| | | | AGGAGGTGATGCTGGAGACC | |
| | | | TGCGGCCTGCTGATGAGCCT | |
| | | | GGGCTGCCCCCTGTTCAAGC | |
| | | | CCGAGCTGATCTACCAGCTG | |
| | | | GACCACAGACAGGAGCTGTG | |
| | | | GATGGCCACCAAGGACCTGA | |
| | | | GCCAGAGCAGCTACCCCGGC | |
| | | | (SEQ ID NO: 1013) | |
| ZFP69 | LLTFKDISIDFTQEEWGQLA | RESLEDEVTPGLPTAESQEL | AGAGAGAGCCTGGAGGACGA | 6.79374304 |
| | PAHQNLYREVMLENYSNLVS | LTFKDISIDFTQEEWGQLAP | GGTGACCCCCGGCCTGCCCA | |
| | V (SEQ ID NO: 237) | AHQNLYREVMLENYSNLVSV | CCGCCGAGAGCCAAGAGCTG | |
| | | GYQLSKPSVISQLEKGEEPW | CTGACCTTCAAGGACATCAG | |
| | | (SEQ ID NO: 238) | CATCGACTTCACCCAGGAGG | |
| | | | AGTGGGGCCAGCTGGCCCCC | |
| | | | GCCCACCAGAACCTGTACAG | |
| | | | AGAGGTGATGCTGGAGAACT | |
| | | | ACAGCAACCTGGTGAGCGTG | |
| | | | GGCTACCAGCTGAGCAAGCC | |
| | | | CAGCGTGATCAGCCAGCTGG | |
| | | | AGAAGGGCGAGGAGCCCTGG | |
| | | | (SEQ ID NO: 1014) | |
| SUMQ1 | IKLKVIGQDSSEIHFKVKMT | EGEYIKLKVIGQDSSEIHFK | GAGGGCGAGTACATCAAGCT | 6.77750481 |
| | THLKKLKESYCQRQGVPMNS | VKMTTHLKKLKESYCQRQGV | GAAGGTGATCGGCCAGGACA | |
| | LRFLFEGQRIADNHTPKELG | PMNSLRFLFEGQRIADNHTP | GCAGCGAGATCCACTTCAAG | |
| | MEEEDVIEVY | KELGMEEEDVIEVYQEQTGG | GTGAAGATGACCACCCACCT | |
| | (SEQ ID NO: 239) | (SEQ ID NO: 240) | GAAGAAGCTGAAGGAGAGCT | |
| | | | ACTGCCAGAGACAGGGCGTG | |
| | | | CCCATGAACAGCCTGAGATT | |
| | | | CCTGTTCGAGGGCCAGAGAA | |
| | | | TCGCCGACAACCACACCCCC | |
| | | | AAGGAGCTGGGCATGGAGGA | |
| | | | GGAGGACGTGATCGAGGTGT | |
| | | | ACCAGGAGCAGACCGGCGGC | |
| | | | (SEQ ID NO: 1015) | |
| ZNF12 | PVSFKDVAVDFTQEEWQQLD | NKSLGPVSFKDVAVDFTQEE | AACAAGAGCCTGGGCCCCGT | 6.77648818 |
| | PEQKITYRDVMLENYSNLVS | WQQLDPEQKITYRDVMLENY | GAGCTTCAAGGACGTGGCCG | |
| | V (SEQ ID NO: 241) | SNLVSVGYHIIKPDVISKLE | TGGACTTCACCCAGGAGGAG | |
| | | QGEEPWIVEGEFLLQSYPDE | TGGCAGCAGCTGGACCCCGA | |
| | | (SEQ ID NO: 242) | GCAGAAGATCACCTACAGAG | |
| | | | ATGTGATGCTGGAGAACTAC | |
| | | | AGCAACCTGGTGAGCGTGGG | |
| | | | CTACCACATCATCAAGCCCG | |
| | | | ACGTGATCAGCAAGCTGGAG | |
| | | | CAGGGCGAGGAGCCCTGGAT | |
| | | | CGTGGAGGGCGAGTTCCTGC | |
| | | | TGCAGAGCTACCCCGACGAG | |
| | | | (SEQ ID NO: 1016) | |
| ZN169 | LMAFRDVAVAFTQKEWKLLS | SPGLLTTRKEALMAFRDVAV | AGCCCCGGCCTGCTGACCAC | 6.77498642 |
| | SAQRTLYREVMLENYSHLVS | AFTQKEWKLLSSAQRTLYRE | CAGAAAGGAGGCCCTGATGG | |
| | L (SEQ ID NO: 243) | VMLENYSHLVSLGIAFSKPK | CCTTCAGAGATGTGGCCGTG | |
| | | LIEQLEQGDEPWREENEHLL | GCCTTCACCCAGAAGGAGTG | |
| | | (SEQ ID NO: 244) | GAAGCTGCTGAGCAGCGCCC | |
| | | | AGAGAACCCTGTACAGAGAG | |
| | | | GTGATGCTGGAGAACTACAG | |
| | | | CCACCTGGTGAGCCTGGGCA | |
| | | | TCGCCTTCAGCAAGCCCAAG | |
| | | | CTGATCGAGCAGCTGGAGCA | |
| | | | GGGCGACGAGCCCTGGAGAG | |
| | | | AGGAGAACGAGCACCTGCTG | |
| | | | (SEQ ID NO: 1017) | |
| ZN433 | SVAFEDVAVTFTQEEWALLD | MFQDSVAFEDVAVTFTQEEW | ATGTTCCAGGACAGCGTGGC | 6.77303438 |
| | PSQKNLCRDVMQETFRNLAS | ALLDPSQKNLCRDVMQETFR | CTTCGAGGACGTGGCCGTGA | |
| | I (SEQ ID NO: 245) | NLASIGKKWKPQNIYVEYEN | CCTTCACCCAGGAGGAGTGG | |
| | | LRRNLRIVGERLFESKEGHQ | GCCCTGCTGGACCCCAGCCA | |
| | | (SEQ ID NO: 246) | GAAGAACCTGTGCAGAGATG | |
| | | | TGATGCAGGAGACCTTCAGA | |
| | | | AACCTGGCCAGCATCGGCAA | |
| | | | GAAGTGGAAGCCCCAGAACA | |
| | | | TCTACGTGGAGTACGAGAAC | |
| | | | CTGAGAAGAAACCTGAGAAT | |
| | | | CGTGGGCGAGAGACTGTTCG | |
| | | | AGAGCAAGGAGGGCCACCAG | |
| | | | (SEQ ID NO: 1018) | |
| SUMQ3 | INLKVAGQDGSVVQFKIKRH | ENDHINLKVAGQDGSVVQFK | GAGAACGACCACATCAACCT | 6.76493545 |
| | TPLSKLMKAYCERQGLSMRQ | IKRHTPLSKLMKAYCERQGL | GAAGGTGGCCGGCCAGGACG | |
| | IRFRFDGQPINETDTPAQLE | SMRQIRFRFDGQPINETDTP | GCAGCGTGGTGCAGTTCAAG | |
| | MEDEDTIDVF | AQLEMEDEDTIDVFQQQTGG | ATCAAGAGACACACCCCCCT | |
| | (SEQ ID NO: 247) | (SEQ ID NO: 248) | GAGCAAGCTGATGAAGGCCT | |
| | | | ACTGCGAGAGACAGGGCCTG | |
| | | | AGCATGAGACAGATCAGATT | |
| | | | CAGATTCGACGGCCAGCCCA | |
| | | | TCAACGAGACCGACACCCCC | |
| | | | GCCCAGCTGGAGATGGAGGA | |
| | | | CGAGGACACCATCGACGTGT | |
| | | | TCCAGCAGCAGACCGGCGGC | |
| | | | (SEQ ID NO: 1019) | |
| ZNF98 | VLTFRDVALEFSLEEWQCLD | PGPLGSLEMGVLTFRDVALE | CCCGGCCCCCTGGGCAGCCT | 6.76469777 |
| | TAQQNLYRNVMLENYRNLVF | FSLEEWQCLDTAQQNLYRNV | GGAGATGGGCGTGCTGACCT | |
| | V (SEQ ID NO: 249) | MLENYRNLVFVGIAASKPDL | TCAGAGATGTGGCCCTGGAG | |
| | | ITCLEQGKEPWNVKRHEMVT | TTCAGCCTGGAGGAGTGGCA | |
| | | (SEQ ID NO: 250) | GTGCCTGGACACCGCCCAGC | |
| | | | AGAACCTGTACAGAAACGTG | |
| | | | ATGCTGGAGAACTACAGAAA | |
| | | | CCTGGTGTTCGTGGGCATCG | |
| | | | CCGCCAGCAAGCCCGACCTG | |
| | | | ATCACCTGCCTGGAGCAGGG | |
| | | | CAAGGAGCCCTGGAACGTGA | |
| | | | AGAGACACGAGATGGTGACC | |
| | | | (SEQ ID NO: 1020) | |
| ZN175 | SVSFEDVTVDFSREEWQQLD | LSQKPQVLGPEKQDGSCEAS | CTGAGCCAGAAGCCCCAGGT | 6.76307142 |
| | PAQRCLYRDVMLELYSHLFA | VSFEDVTVDFSREEWQQLDP | GCTGGGCCCCGAGAAGCAGG | |
| | V (SEQ ID NO: 251) | AQRCLYRDVMLELYSHLFAV | ACGGCAGCTGCGAGGCTAGC | |
| | | GYHIPNPEVIFRMILKEKEP | GTGAGCTTCGAGGACGTGAC | |
| | | R (SEQ ID NO: 252) | CGTGGACTTCAGCAGAGAGG | |
| | | | AGTGGCAGCAGCTGGACCCC | |
| | | | GCCCAGAGATGCCTGTACAG | |
| | | | AGATGTGATGCTGGAGCTGT | |
| | | | ACAGCCACCTGTTCGCCGTG | |
| | | | GGCTACCACATCCCCAACCC | |
| | | | CGAGGTGATCTTCAGAATGC | |
| | | | TGAAGGAGAAGGAGCCCAGA | |
| | | | (SEQ ID NO: 1021) | |
| ZN347 | QVTFRDVAIEFSQEEWTCLD | ALTQGQVTFRDVAIEFSQEE | GCCCTGACCCAGGGCCAGGT | 6.75405678 |
| | PAQRTLYRDVMLENYRNLAS | WTCLDPAQRTLYRDVMLENY | GACCTTCAGAGATGTGGCCA | |
| | L (SEQ ID NO: 253) | RNLASLGISCFDLSIISMLE | TCGAGTTCAGCCAGGAGGAG | |
| | | QGKEPFTLESQVQIAGNPDG | TGGACCTGCCTGGACCCCGC | |
| | | (SEQ ID NO: 254) | CCAGAGAACCCTGTACAGAG | |
| | | | ATGTGATGCTGGAGAACTAC | |
| | | | AGAAACCTGGCCAGCCTGGG | |
| | | | CATCAGCTGCTTCGACCTGA | |
| | | | GCATCATCAGCATGCTGGAG | |
| | | | CAGGGCAAGGAGCCCTTCAC | |
| | | | CCTGGAGAGCCAGGTGCAGA | |
| | | | TCGCCGGCAACCCCGACGGC | |
| | | | (SEQ ID NO: 1022) | |
| ZNF25 | PVTLKDVIVEFTKEEWKLLT | NKFQGPVTLKDVIVEFTKEE | AACAAGTTCCAGGGCCCCGT | 6.75008459 |
| | PAQRTLYKDVMLENYSHLVS | WKLLTPAQRTLYKDVMLENY | GACCCTGAAGGACGTGATCG | |
| | V (SEQ ID NO: 255) | SHLVSVGYHVNKPNAVFKLK | TGGAGTTCACCAAGGAGGAG | |
| | | QGKEPWILEVEFPHRGFPED | TGGAAGCTGCTGACCCCCGC | |
| | | (SEQ ID NO: 256) | CCAGAGAACCCTGTACAAGG | |
| | | | ACGTGATGCTGGAGAACTAC | |
| | | | AGCCACCTGGTGAGCGTGGG | |
| | | | CTACCACGTGAACAAGCCCA | |
| | | | ACGCCGTGTTCAAGCTGAAG | |
| | | | CAGGGCAAGGAGCCCTGGAT | |
| | | | CCTGGAGGTGGAGTTCCCCC | |
| | | | ACAGAGGCTTCCCCGAGGAC | |
| | | | (SEQ ID NO: 1023) | |
| ZN519 | LLTFRDVAIEFSPEEWKCLD | ELLTFRDVAIEFSPEEWKCL | GAGCTGCTGACCTTCAGAGA | 6.74815071 |
| | PAQQNLYRDVMLENYRNLVS | DPAQQNLYRDVMLENYRNLV | TGTGGCCATCGAGTTCAGCC | |
| | (SEQ ID NO: 257) | SLAVYSYYNQGILPEQGIQD | CCGAGGAGTGGAAGTGCCTG | |
| | | SFKKATLGRYGSCGLENICL | GACCCCGCCCAGCAGAACCT | |
| | | (SEQ ID NO: 258) | GTACAGAGATGTGATGCTGG | |
| | | | AGAACTACAGAAACCTGGTG | |
| | | | AGCCTGGCCGTGTACAGCTA | |
| | | | CTACAACCAGGGCATCCTGC | |
| | | | CCGAGCAGGGCATCCAGGAC | |
| | | | AGCTTCAAGAAGGCCACCCT | |
| | | | GGGCAGATACGGCAGCTGCG | |
| | | | GCCTGGAGAACATCTGCCTG | |
| | | | (SEQ ID NO: 1024) | |
| Z585B | SVSFRDVAIDFSREEWRHLD | SPQKSSALAPEDHGSSYEGS | AGCCCCCAGAAGAGCAGCGC | 6.74700322 |
| | LSQRNLYRDVMLETYSHLLS | VSFRDVAIDFSREEWRHLDL | CCTGGCCCCCGAGGACCACG | |
| | V (SEQ ID NO: 259) | SQRNLYRDVMLETYSHLLSV | GCAGCAGCTACGAGGGAAGC | |
| | | GYQVPKPEVVMLEQGKEPWA | GTGAGCTTCAGAGATGTGGC | |
| | | (SEQ ID NO: 260) | CATCGACTTCAGCAGAGAGG | |
| | | | AGTGGAGACACCTGGACCTG | |
| | | | AGCCAGAGAAACCTGTACAG | |
| | | | AGATGTGATGCTGGAGACCT | |
| | | | ACAGCCACCTGCTGAGCGTG | |
| | | | GGCTACCAGGTGCCCAAGCC | |
| | | | CGAGGTGGTGATGCTGGAGC | |
| | | | AGGGCAAGGAGCCCTGGGCC | |
| | | | (SEQ ID NO: 1025) | |
| ZIM3 | RVTFEDVTVNFTQGEWQRLN | NNSQGRVTFEDVTVNFTQGE | AACAACAGCCAGGGCAGAGT | 6.74462278 |
| | PEQRNLYRDVMLENYSNLVS | WQRLNPEQRNLYRDVMLENY | GACCTTCGAGGACGTGACCG | |
| | V (SEQ ID NO: 261) | SNLVSVGQGETTKPDVILRL | TGAACTTCACCCAGGGCGAG | |
| | | EQGKEPWLEEEEVLGSGRAE | TGGCAGAGACTGAACCCCGA | |
| | | (SEQ ID NO: 262) | GCAGAGAAACCTGTACAGAG | |
| | | | ATGTGATGCTGGAGAACTAC | |
| | | | AGCAACCTGGTGAGCGTGGG | |
| | | | CCAGGGCGAGACCACCAAGC | |
| | | | CCGACGTGATCCTGAGACTG | |
| | | | GAGCAGGGCAAGGAGCCCTG | |
| | | | GCTGGAGGAGGAGGAGGTGC | |
| | | | TGGGCAGCGGCAGAGCCGAG | |
| | | | (SEQ ID NO: 1026) | |
| ZN517 | AVVFEDVAVYFTRIEWSCLA | AMALPMPGPQEAVVFEDVAV | GCCATGGCCCTGCCCATGCC | 6.71923079 |
| | PDQQALYRDVMLENYGNLAS | YFTRIEWSCLAPDQQALYRD | CGGCCCCCAGGAGGCCGTGG | |
| | L (SEQ ID NO: 263) | VMLENYGNLASLGFLVAKPA | TGTTCGAGGACGTTGCCGTG | |
| | | LISLLEQGEEPGALILQVAE | TACTTCACCAGAATCGAGTG | |
| | | (SEQ ID NO: 264) | GAGCTGCCTGGCCCCCGACC | |
| | | | AGCAGGCCCTGTACAGAGAT | |
| | | | GTGATGCTGGAGAACTACGG | |
| | | | CAACCTGGCCAGCCTGGGCT | |
| | | | TCCTGGTGGCCAAGCCCGCC | |
| | | | CTGATCAGCCTGCTGGAGCA | |
| | | | GGGCGAGGAGCCCGGAGCCC | |
| | | | TGATCCTGCAGGTGGCCGAG | |
| | | | (SEQ ID NO: 1027) | |
| ZN846 | LVTFEDVAVDFTQEEWTLLD | DSSQHLVTFEDVAVDFTQEE | GACAGCAGCCAGCACCTGGT | 6.70970056 |
| | QAQRDLYRDVMLENYKNLII | WTLLDQAQRDLYRDVMLENY | GACCTTCGAGGACGTGGCCG | |
| | (SEQ ID NO: 265) | KNLIILAGSELFKRSLMSGL | TGGACTTCACCCAGGAGGAG | |
| | | EQMEELRTGVTGVLQELDLQ | TGGACCCTGCTGGACCAGGC | |
| | | (SEQ ID NO: 266) | CCAGAGAGACCTGTACAGAG | |
| | | | ATGTGATGCTGGAGAACTAC | |
| | | | AAGAACCTGATCATCCTGGC | |
| | | | CGGCAGCGAGCTGTTCAAGA | |
| | | | GAAGCCTGATGAGCGGCCTG | |
| | | | GAGCAGATGGAGGAGCTGAG | |
| | | | AACCGGCGTGACCGGCGTGC | |
| | | | TGCAGGAGCTGGACCTGCAG | |
| | | | (SEQ ID NO: 1028) | |
| ZN230 | AVTFKDVAVFFTEEELGLLD | TTFKEAVTFKDVAVFFTEEE | ACCACCTTCAAGGAGGCCGT | 6.70246908 |
| | PAQRKLYQDVMLENFTNLLS | LGLLDPAQRKLYQDVMLENF | GACCTTCAAGGACGTGGCCG | |
| | V (SEQ ID NO: 267) | TNLLSVGHQPFHPFHFLREE | TGTTCTTCACCGAGGAGGAG | |
| | | KFWMMETATQREGNSGGKTI | CTGGGCCTGCTGGACCCCGC | |
| | | (SEQ ID NO: 268) | CCAGAGAAAGCTGTACCAGG | |
| | | | ACGTGATGCTGGAGAACTTC | |
| | | | ACCAACCTGCTGAGCGTGGG | |
| | | | CCACCAGCCCTTCCACCCCT | |
| | | | TCCACTTCCTGAGAGAGGAG | |
| | | | AAGTTCTGGATGATGGAGAC | |
| | | | CGCCACCCAGAGAGAGGGCA | |
| | | | ACAGCGGCGGCAAGACCATC | |
| | | | (SEQ ID NO: 1029) | |
| ZNF66 | PLQFRDVAIEFSLEEWHCLD | GPLQFRDVAIEFSLEEWHC | GGCCCCCTGCAGTTCAGAGA | 6.69981008 |
| | MAQRNLYRDVMLENYRNLVF | LDMAQ | TGTGGCCATCGAGTTCAGCC | |
| | L (SEQ ID NO: 269) | RNLYRDVMLENYRNLVFLGI | TGGAGGAGTGGCACTGCCTG | |
| | | VVSKPDLITHLEQGKKPSTM | GACATGGCCCAGAGAAACCT | |
| | | QRHEMVANPSVLCSHF | GTACAGAGATGTGATGCTGG | |
| | | (SEQ ID NO: 270) | AGAACTACAGAAACCTGGTG | |
| | | | TTCCTGGGCATCGTGGTGAG | |
| | | | CAAGCCCGACCTGATCACCC | |
| | | | ACCTGGAGCAGGGCAAGAAG | |
| | | | CCCAGCACCATGCAGAGACA | |
| | | | CGAGATGGTGGCCAACCCCA | |
| | | | GCGTGCTGTGCAGCCACTTC | |
| | | | (SEQ ID NO: 1030) | |
| ZFP1 | SVSFTDVTVDFTQEEWEQLD | NKSQGSVSFTDVTVDFTQEE | AACAAGAGCCAGGGCAGCGT | 6.69334133 |
| | PSQRILYMDVMLENYSNLLS | WEQLDPSQRILYMDVMLENY | GAGCTTCACCGACGTGACCG | |
| | V (SEQ ID NO: 271) | SNLLSVEVWKADDQMERDHR | TGGACTTCACCCAGGAGGAG | |
| | | NPDEQARQFLILKNQTPIEE | TGGGAGCAGCTGGACCCCAG | |
| | | (SEQ ID NO: 272) | CCAGAGAATCCTGTACATGG | |
| | | | ACGTGATGCTGGAGAACTAC | |
| | | | AGCAACCTGCTGAGCGTGGA | |
| | | | GGTGTGGAAGGCCGACGACC | |
| | | | AGATGGAGAGAGACCACAGA | |
| | | | AACCCCGACGAGCAGGCCAG | |
| | | | ACAGTTCCTGATCCTGAAGA | |
| | | | ACCAGACCCCCATCGAGGAG | |
| | | | (SEQ ID NO: 1031) | |
| ZN713 | SLTFQDVAVDFTREEWDQLY | EEEEMNDGSQMVRSQESLTF | GAGGAGGAGGAGATGAACGA | 6.68245851 |
| | PAQKNLYRDVMLENYRNLVA | QDVAVDFTREEWDQLYPAQK | CGGCAGCCAGATGGTGAGAA | |
| | L (SEQ ID NO: 273) | NLYRDVMLENYRNLVALGYQ | GCCAGGAGAGCCTGACCTTC | |
| | | LCKPEVIAQLELEEEWVIER | CAGGACGTGGCCGTGGACTT | |
| | | (SEQ ID NO: 274) | CACCAGAGAGGAGTGGGACC | |
| | | | AGCTGTACCCCGCCCAGAAG | |
| | | | AACCTGTACAGAGATGTGAT | |
| | | | GCTGGAGAACTACAGAAACC | |
| | | | TGGTGGCCCTGGGCTACCAG | |
| | | | CTGTGCAAGCCCGAGGTGAT | |
| | | | CGCCCAGCTGGAGCTGGAGG | |
| | | | AGGAGTGGGTGATCGAGAGA | |
| | | | (SEQ ID NO: 1032) | |
| ZN816 | RLTFRDVAIEFSLEEWKCLN | EEATKKSKEKEPGMALPQGR | GAGGAGGCCACCAAGAAGAG | 6.67677315 |
| | PAQRALYRAVMLENYRNLEF | LTFRDVAIEFSLEEWKCLNP | CAAGGAGAAGGAGCCCGGCA | |
| | V (SEQ ID NO: 275) | AQRALYRAVMLENYRNLEFV | TGGCCCTGCCCCAGGGCAGA | |
| | | DSSLKSMMEFSSTRHSITGE | CTGACCTTCAGAGATGTGGC | |
| | | (SEQ ID NO: 276) | CATCGAGTTCAGCCTGGAGG | |
| | | | AGTGGAAGTGCCTGAACCCC | |
| | | | GCCCAGAGAGCCCTGTACAG | |
| | | | AGCCGTGATGCTGGAGAACT | |
| | | | ACAGAAACCTGGAGTTCGTG | |
| | | | GACAGCAGCCTGAAGAGCAT | |
| | | | GATGGAGTTCAGCAGCACCA | |
| | | | GACACAGCATCACCGGCGAG | |
| | | | (SEQ ID NO: 1033) | |
| ZN426 | SVTFDDVAVDFTQEEWILLD | EKTPAGRIVADCLTDCYQDS | GAGAAGACCCCCGCCGGCAG | 6.67185066 |
| | STQRSLYSDVMLENYKNLAT | VTFDDVAVDFTQEEWTLLDS | AATCGTGGCCGACTGCCTGA | |
| | V (SEQ ID NO: 277) | TQRSLYSDVMLENYKNLATV | CCGACTGCTACCAGGACAGC | |
| | | GGQIIKPSLISWLEQEESRT | GTGACCTTCGACGACGTGGC | |
| | | (SEQ ID NO: 278) | CGTGGACTTCACCCAGGAGG | |
| | | | AGTGGACCCTGCTGGACAGC | |
| | | | ACCCAGAGAAGCCTGTACAG | |
| | | | CGACGTGATGCTGGAGAACT | |
| | | | ACAAGAACCTGGCCACCGTG | |
| | | | GGCGGCCAGATCATCAAGCC | |
| | | | CAGCCTGATCAGCTGGCTGG | |
| | | | AGCAGGAGGAGAGCAGAACC | |
| | | | (SEQ ID NO: 1034) | |
| ZN701 | LLTFRDVAIEFSQEEWK | KTRKRKRKAKESGMALLQGL | AAGACCAGAAAGAGAAAGAG | 6.66820921 |
| | CLDPAQRTLYRDVMLE | LTFRDVAIEFSQEEWKCLDP | AAAGGCCAAGGAGAGCGGCA | |
| | NYRNLVSL | AQRTLYRDVMLENYRNLVSL | TGGCCCTGCTGCAGGGCCTG | |
| | (SEQ ID NO: 279) | DTSSKCMMKMFSSTGQGNTE | CTGACCTTCAGAGATGTGGC | |
| | | (SEQ ID NO: 280) | CATCGAGTTCAGCCAGGAGG | |
| | | | AGTGGAAGTGCCTGGACCCC | |
| | | | GCCCAGAGAACCCTGTACAG | |
| | | | AGATGTGATGCTGGAGAACT | |
| | | | ACAGAAACCTGGTGAGCCTG | |
| | | | GACACCAGCAGCAAGTGCAT | |
| | | | GATGAAGATGTTCAGCAGCA | |
| | | | CCGGCCAGGGCAACACCGAG | |
| | | | (SEQ ID NO: 1035) | |
| ZN674 | SLTFKDVFVDFTLEEWQQLD | AMSQESLTFKDVFVDFTLEE | GCCATGAGCCAGGAGAGCCT | 6.6636553 |
| | SAQKNLYRDVMLENYSHLVS | WQQLDSAQKNLYRDVMLENY | GACCTTCAAGGACGTGTTCG | |
| | V (SEQ ID NO: 281) | SHLVSVGHLVGKPDVIFRLG | TGGACTTCACCCTGGAGGAG | |
| | | PGDESWMADGGTPVRTCAGE | TGGCAGCAGCTGGACAGCGC | |
| | | (SEQ ID NO: 282) | CCAGAAGAACCTGTACAGAG | |
| | | | ATGTGATGCTGGAGAACTAC | |
| | | | AGCCACCTGGTGAGCGTGGG | |
| | | | CCACCTGGTGGGCAAGCCCG | |
| | | | ACGTGATCTTCAGACTGGGC | |
| | | | CCCGGCGACGAGAGCTGGAT | |
| | | | GGCCGACGGCGGCACACCTG | |
| | | | TGAGAACCTGCGCCGGCGAG | |
| | | | (SEQ ID NO: 1036) | |
| ZN627 | SVAFEDVAVNFTLEEWALLD | DSVAFEDVAVNFTLEEWALL | GACAGCGTGGCCTTCGAGGA | 6.66232669 |
| | PSQKNLYRDVMRETFRNLAS | DPSQKNLYRDVMRETFRNLA | CGTGGCCGTGAACTTCACCC | |
| | V (SEQ ID NO: 283) | SVGKQWEDQNIEDPFKIPRR | TGGAGGAGTGGGCCCTGCTG | |
| | | NISHIPERLCESKEGGQGEE | GACCCCAGCCAGAAGAACCT | |
| | | (SEQ ID NO: 284) | GTACAGAGATGTGATGAGAG | |
| | | | AGACCTTCAGAAACCTGGCC | |
| | | | AGCGTGGGCAAGCAGTGGGA | |
| | | | GGACCAGAACATCGAGGACC | |
| | | | CCTTCAAGATCCCCAGAAGA | |
| | | | AACATCAGCCACATCCCCGA | |
| | | | GAGACTGTGCGAGAGCAAGG | |
| | | | AGGGCGGCCAGGGCGAGGAG | |
| | | | (SEQ ID NO: 1037) | |
| ZNF20 | SVAFEDVAVSFTQEEWALLD | MFQDSVAFEDVAVSFTQEEW | ATGTTCCAGGACAGCGTGGC | 6.65839711 |
| | PSQKNLYRDVMQETFKNLTS | ALLDPSQKNLYRDVMQETFK | CTTCGAGGACGTGGCCGTGA | |
| | V (SEQ ID NO: 285) | NLTSVGKTWKVQNIEDEYKN | GCTTCACCCAGGAGGAGTGG | |
| | | PRRNLSLMREKLCESKESHH | GCCCTGCTGGACCCCAGCCA | |
| | | (SEQ ID NO: 286) | GAAGAACCTGTACAGAGATG | |
| | | | TGATGCAGGAGACCTTCAAG | |
| | | | AACCTGACCAGCGTGGGCAA | |
| | | | GACCTGGAAGGTGCAGAACA | |
| | | | TCGAGGACGAGTACAAGAAC | |
| | | | CCCAGAAGAAACCTGAGCCT | |
| | | | GATGAGAGAGAAGCTGTGCG | |
| | | | AGAGCAAGGAGAGCCACCAC | |
| | | | (SEQ ID NO: 1038) | |
| Z587B | TVTFEDVAVKFTQEEWNLLS | AVVATLRLSAQGTVTFEDVA | GCCGTGGTGGCCACCCTGAG | 6.63154785 |
| | EAQRCLYRDVTLENLALMSS | VKFTQEEWNLLSEAQRCLYR | ACTGAGCGCCCAGGGCACCG | |
| | L (SEQ ID NO: 287) | DVTLENLALMSSLGCWCGVE | TGACCTTCGAGGACGTGGCC | |
| | | DEAAPSKQSIYIQRETQVRT | GTGAAGTTCACCCAGGAGGA | |
| | | (SEQ ID NO: 288) | GTGGAACCTGCTGAGCGAGG | |
| | | | CCCAGAGATGCCTGTACAGA | |
| | | | GATGTGACCCTGGAGAACCT | |
| | | | GGCCCTGATGAGCAGCCTGG | |
| | | | GCTGCTGGTGCGGCGTGGAG | |
| | | | GACGAGGCCGCCCCTAGCAA | |
| | | | GCAGAGCATCTACATCCAGA | |
| | | | GAGAGACCCAGGTGAGAACC | |
| | | | (SEQ ID NO: 1039) | |
| ZN316 | LVTFEDVAVYFSLEEWERLE | EEEEEDEDEDDLLTAGCQEL | GAGGAGGAGGAGGAGGACGA | 6.62746569 |
| | ADQRGLYQEVMQENYGILVS | VTFEDVAVYFSLEEWERLEA | GGACGAGGACGACCTGCTGA | |
| | L (SEQ ID NO: 289) | DQRGLYQEVMQENYGILVSL | CCGCCGGCTGCCAGGAGCTG | |
| | | GYPIPKPDLIFRLEQGEEPW | GTGACCTTCGAGGACGTGGC | |
| | | (SEQ ID NO: 290) | CGTGTACTTCAGCCTGGAGG | |
| | | | AGTGGGAGAGACTGGAGGCC | |
| | | | GACCAGAGAGGCCTGTACCA | |
| | | | GGAGGTGATGCAGGAGAACT | |
| | | | ACGGCATCCTGGTGAGCCTG | |
| | | | GGCTACCCCATCCCCAAGCC | |
| | | | CGACCTGATCTTCAGACTGG | |
| | | | AGCAGGGCGAGGAGCCCTGG | |
| | | | (SEQ ID NO: 1040) | |
| ZN233 | MVTFKDVAVVFTREELGLLD | TKFQEMVTFKDVAVVFTREE | ACCAAGTTCCAGGAGATGGT | 6.62252575 |
| | LAQRKLYQDVMLENFRNLLS | LGLLDLAQRKLYQDVMLENF | GACCTTCAAGGACGTGGCCG | |
| | V (SEQ ID NO: 291) | RNLLSVGYQPFKLDVILQLG | TGGTGTTCACCAGAGAGGAG | |
| | | KEDKLRMMETEIQGDGCSGH | CTGGGCCTGCTGGACCTGGC | |
| | | (SEQ ID NO: 292) | CCAGAGAAAGCTGTACCAGG | |
| | | | ACGTGATGCTGGAGAACTTC | |
| | | | AGAAACCTGCTGAGCGTGGG | |
| | | | CTACCAGCCCTTCAAGCTGG | |
| | | | ACGTGATCCTGCAGCTGGGC | |
| | | | AAGGAGGACAAGCTGAGAAT | |
| | | | GATGGAGACCGAGATCCAGG | |
| | | | GCGACGGCTGCAGCGGCCAC | |
| | | | (SEQ ID NO: 1041) | |
| ZN611 | RLTFRDVAIEFSLAEWKCLN | EEAAQKRKGKEPGMALPQGR | GAGGAGGCCGCCCAGAAGAG | 6.61854262 |
| | PSQRALYREVMLENYRNLEA | LTFRDVAIEFSLAEWKCLNP | AAAGGGCAAGGAGCCCGGCA | |
| | V (SEQ ID NO: 293) | SQRALYREVMLENYRNLEAV | TGGCCCTGCCCCAGGGCAGA | |
| | | DISSKCMMKEVLSTGQGNTE | CTGACCTTCAGAGATGTGGC | |
| | | (SEQ ID NO: 294) | CATCGAGTTCAGCCTGGCCG | |
| | | | AGTGGAAGTGCCTGAACCCC | |
| | | | AGCCAGAGAGCCCTGTACAG | |
| | | | AGAGGTGATGCTGGAGAACT | |
| | | | ACAGAAACCTGGAGGCCGTG | |
| | | | GACATCAGCAGCAAGTGCAT | |
| | | | GATGAAGGAGGTGCTGAGCA | |
| | | | CCGGCCAGGGCAACACCGAG | |
| | | | (SEQ ID NO: 1042) | |
| ZN556 | TVVFEDVVVDFTLEEWALLN | DTVVFEDVVVDFTLEEWALL | GACACCGTGGTGTTCGAGGA | 6.61519705 |
| | PAQRKLYRDVMLETFKHLAS | NPAQRKLYRDVMLETFKHLA | CGTGGTGGTGGACTTCACCC | |
| | V (SEQ ID NO: 295) | SVDNEAQLKASGSISQQDTS | TGGAGGAGTGGGCCCTGCTG | |
| | | GEKLSLKQKIEKFTRKNIWA | AACCCCGCCCAGAGAAAGCT | |
| | | (SEQ ID NO: 296) | GTACAGAGATGTGATGCTGG | |
| | | | AGACCTTCAAGCACCTGGCC | |
| | | | AGCGTGGACAACGAGGCCCA | |
| | | | GCTGAAGGCCAGCGGCAGCA | |
| | | | TCAGCCAGCAGGACACCAGC | |
| | | | GGCGAGAAGCTGAGCCTGAA | |
| | | | GCAGAAGATCGAGAAGTTCA | |
| | | | CCAGAAAGAACATCTGGGCC | |
| | | | (SEQ ID NO: 1043) | |
| ZN234 | GLTFKDVAVVFTEEELGLLD | TTFKEGLTFKDVAVVFTEEE | ACCACCTTCAAGGAGGGCCT | 6.60158035 |
| | PVQRNLYQDVMLENFRNLLS | LGLLDPVQRNLYQDVMLENF | GACCTTCAAGGACGTGGCCG | |
| | V (SEQ ID NO: 297) | RNLLSVGHHPFKHDVFLLEK | TGGTGTTCACCGAGGAGGAG | |
| | | EKKLDIMKTATQRKGKSADK | CTGGGCCTGCTGGACCCCGT | |
| | | (SEQ ID NO: 298) | GCAGAGAAACCTGTACCAGG | |
| | | | ACGTGATGCTGGAGAACTTC | |
| | | | AGAAACCTGCTGAGCGTGGG | |
| | | | CCACCACCCCTTCAAGCACG | |
| | | | ACGTGTTCCTGCTGGAGAAG | |
| | | | GAGAAGAAGCTGGACATCAT | |
| | | | GAAGACCGCCACCCAGAGAA | |
| | | | AGGGCAAGAGCGCCGACAAG | |
| | | | (SEQ ID NO: 1044) | |
| ZN560 | LVTFDSVAVEFTQEEWTLLD | SALQQEFWKIQTSNGIQMDL | AGCGCCCTGCAGCAGGAGTT | 6.60066711 |
| | PAQRNLYSDVMLENYKNLSS | VTFDSVAVEFTQEEWTLLDP | CTGGAAGATCCAGACCAGCA | |
| | V (SEQ ID NO: 299) | AQRNLYSDVMLENYKNLSSV | ACGGCATCCAGATGGACCTG | |
| | | GYQLFKPSLISWLEEEEELS | GTGACCTTCGACAGCGTGGC | |
| | | (SEQ ID NO: 300) | CGTGGAGTTCACCCAGGAGG | |
| | | | AGTGGACCCTGCTGGACCCC | |
| | | | GCCCAGAGAAACCTGTACAG | |
| | | | CGACGTGATGCTGGAGAACT | |
| | | | ACAAGAACCTGAGCAGCGTG | |
| | | | GGCTACCAGCTGTTCAAGCC | |
| | | | CAGCCTGATCAGCTGGCTGG | |
| | | | AGGAGGAGGAGGAGCTGAGC | |
| | | | (SEQ ID NO: 1045) | |
| ZNF77 | CVIFEEVAVNFTPEEWALLD | DCVIFEEVAVNFTPEEWALL | GACTGCGTGATCTTCGAGGA | 6.58987943 |
| | HAQRSLYRDVMLETCRNLAS | DHAQRSLYRDVMLETCRNLA | GGTGGCCGTGAACTTCACCC | |
| | L (SEQ ID NO: 301) | SLDCYIYVRTSGSSSQRDVF | CCGAGGAGTGGGCCCTGCTG | |
| | | GNGISNDEEIVKFTGSDSWS | GACCACGCCCAGAGAAGCCT | |
| | | (SEQ ID NO: 302) | GTACAGAGATGTGATGCTGG | |
| | | | AGACCTGCAGAAACCTGGCC | |
| | | | AGCCTGGACTGCTACATCTA | |
| | | | CGTGAGAACCAGCGGCAGCA | |
| | | | GCAGCCAGAGAGATGTGTTC | |
| | | | GGCAACGGCATCAGCAACGA | |
| | | | CGAGGAGATCGTGAAGTTCA | |
| | | | CCGGCAGCGACAGCTGGAGC | |
| | | | (SEQ ID NO: 1046) | |
| ZN682 | LLTFRDVTIEFSLEEWEFLN | ELLTFRDVTIEFSLEEWEFL | GAGCTGCTGACCTTCAGAGA | 6.58030961 |
| | PAQQSLYRKVMLENYRNLVS | NPAQQSLYRKVMLENYRNLV | TGTGACCATCGAGTTCAGCC | |
| | L (SEQ ID NO: 303) | SLGLTVSKPELISRLEQRQE | TGGAGGAGTGGGAGTTCCTG | |
| | | PWNVKRHETIAKPPAMSSHY | AACCCCGCCCAGCAGAGCCT | |
| | | (SEQ ID NO: 304) | GTACAGAAAGGTGATGCTGG | |
| | | | AGAACTACAGAAACCTGGTG | |
| | | | AGCCTGGGCCTGACCGTGAG | |
| | | | CAAGCCCGAGCTGATCAGCA | |
| | | | GACTGGAGCAGAGACAGGAG | |
| | | | CCCTGGAACGTGAAGAGACA | |
| | | | CGAGACCATCGCCAAGCCCC | |
| | | | CCGCCATGAGCAGCCACTAC | |
| | | | (SEQ ID NO: 1047) | |
| ZN614 | SLTLEDVAVEFSWEEWQLLD | IKTQESLTLEDVAVEFSWEE | ATCAAGACCCAGGAGAGCCT | 6.57723831 |
| | TAQKNLYRDVMVENYNHLVS | WQLLDTAQKNLYRDVMVENY | GACCCTGGAGGACGTGGCCG | |
| | L (SEQ ID NO: 305) | NHLVSLGYQTSKPDVLSKLA | TGGAGTTCAGCTGGGAGGAG | |
| | | HGQEPWTTDAKIQNKNCPGI | TGGCAGCTGCTGGACACCGC | |
| | | (SEQ ID NO: 306) | CCAGAAGAACCTGTACAGAG | |
| | | | ATGTGATGGTGGAGAACTAC | |
| | | | AACCACCTGGTGAGCCTGGG | |
| | | | CTACCAGACCAGCAAGCCCG | |
| | | | ACGTGCTGAGCAAGCTGGCC | |
| | | | CACGGCCAGGAGCCCTGGAC | |
| | | | CACCGACGCCAAGATCCAGA | |
| | | | ACAAGAACTGCCCCGGCATC | |
| | | | (SEQ ID NO: 1048) | |
| ZN785 | AVSFADVAVYFSPEEWECLR | PAHVPGEAGPRRTRESRPGA | CCCGCCCACGTGCCCGGCGA | 6.56301724 |
| | PAQRALYRDVMRETFGHLGA | VSFADVAVYFSPEEWECLRP | GGCCGGCCCCAGAAGAACCA | |
| | L (SEQ ID NO: 307) | AQRALYRDVMRETFGHLGAL | GAGAGAGCAGACCCGGCGCT | |
| | | GFSVPKPAFISWVEGEVEAW | GTGAGCTTCGCCGACGTGGC | |
| | | (SEQ ID NO: 308) | CGTGTACTTCAGCCCCGAGG | |
| | | | AGTGGGAGTGCCTGAGACCC | |
| | | | GCCCAGAGAGCCCTGTACAG | |
| | | | AGATGTGATGAGAGAGACCT | |
| | | | TCGGCCACCTGGGCGCCCTG | |
| | | | GGCTTCAGCGTGCCCAAGCC | |
| | | | CGCCTTCATCAGCTGGGTGG | |
| | | | AGGGCGAGGTGGAGGCCTGG | |
| | | | (SEQ ID NO: 1049) | |
| ZN445 | TMTFKDVEVTFSQDEWGWLD | GCPGDQVTPTRSLTAQLQET | GGCTGCCCCGGCGACCAGGT | 6.54429484 |
| | SAQRNLYRDVMLENYRNMAS | MTFKDVEVTFSQDEWGWLDS | GACCCCCACCAGAAGCCTGA | |
| | (SEQ ID NO: 309) | AQRNLYRDVMLENYRNMASL | CCGCCCAGCTGCAGGAGACC | |
| | | VGPFTKPALISWLEAREPWG | ATGACCTTCAAGGACGTGGA | |
| | | (SEQ ID NO: 310) | GGTGACCTTCAGCCAGGACG | |
| | | | AGTGGGGCTGGCTGGACAGC | |
| | | | GCCCAGAGAAACCTGTACAG | |
| | | | AGATGTGATGCTGGAGAACT | |
| | | | ACAGAAACATGGCCAGCCTG | |
| | | | GTGGGCCCCTTCACCAAGCC | |
| | | | CGCCCTGATCAGCTGGCTGG | |
| | | | AGGCCAGAGAGCCCTGGGGC | |
| | | | (SEQ ID NO: 1050) | |
| ZFP30 | LVMFRDVAVDFSQEEWECLN | ARDLVMFRDVAVDFSQEEWE | GCCAGAGACCTGGTGATGTT | 6.54105426 |
| | SYQRNLYRDVILENYSNLVS | CLNSYQRNLYRDVILENYSN | CAGAGATGTGGCCGTGGACT | |
| | (SEQ ID NO: 311) | LVSLAGCSISKPDVITLLEQ | TCAGCCAGGAGGAGTGGGAG | |
| | | GKEPWMVVRDEKRRWTLDLE | TGCCTGAACAGCTACCAGAG | |
| | | (SEQ ID NO: 312) | AAACCTGTACAGAGATGTGA | |
| | | | TCCTGGAGAACTACAGCAAC | |
| | | | CTGGTGAGCCTGGCCGGCTG | |
| | | | CAGCATCAGCAAGCCCGACG | |
| | | | TGATCACCCTGCTGGAGCAG | |
| | | | GGCAAGGAGCCCTGGATGGT | |
| | | | GGTGAGAGATGAGAAGAGAA | |
| | | | GATGGACCCTGGACCTGGAG | |
| | | | (SEQ ID NO: 1051) | |
| ZN225 | AVTFKDVAVVFTEEELRLLD | TTLKEAVTFKDVAVVFTEEE | ACCACCCTGAAGGAGGCCGT | 6.53858149 |
| | LAQRKLYREVMLENFRNLLS | LRLLDLAQRKLYREVMLENF | GACCTTCAAGGACGTGGCCG | |
| | V (SEQ ID NO: 313) | RNLLSVGHQSLHRDTFHFLK | TGGTGTTCACCGAGGAGGAG | |
| | | EEKFWMMETATQREGNLGGK | CTGAGACTGCTGGACCTGGC | |
| | | (SEQ ID NO: 314) | CCAGAGAAAGCTGTACAGAG | |
| | | | AGGTGATGCTGGAGAACTTC | |
| | | | AGAAACCTGCTGAGCGTGGG | |
| | | | CCACCAGAGCCTGCACAGAG | |
| | | | ACACCTTCCACTTCCTGAAG | |
| | | | GAGGAGAAGTTCTGGATGAT | |
| | | | GGAGACCGCCACCCAGAGAG | |
| | | | AGGGCAACCTGGGGGGCAAG | |
| | | | (SEQ ID NO: 1052) | |
| ZN551 | GMTFEDVAIYFSQEEWELLD | SPPSPRSSMAAVALRDSAQG | AGCCCCCCCAGCCCCAGAAG | 6.53471613 |
| | ESQRFLYCDVMLENFAHVTS | MTFEDVAIYFSQEEWELLDE | CAGCATGGCCGCCGTGGCCC | |
| | L (SEQ ID NO: 315) | SQRFLYCDVMLENFAHVTSL | TGAGAGACAGCGCCCAGGGC | |
| | | GYCHGMENEAIASEQSVSIQ | ATGACCTTCGAGGACGTGGC | |
| | | (SEQ ID NO: 316) | CATCTACTTCAGCCAGGAGG | |
| | | | AGTGGGAGCTGCTGGACGAG | |
| | | | AGCCAGAGATTCCTGTACTG | |
| | | | CGACGTGATGCTGGAGAACT | |
| | | | TCGCCCACGTGACCAGCCTG | |
| | | | GGCTACTGCCACGGCATGGA | |
| | | | GAACGAGGCCATCGCCAGCG | |
| | | | AGCAGAGCGTGAGCATCCAG | |
| | | | (SEQ ID NO: 1053) | |
| ZN610 | RLTFMDVAIEFSQEEWKSLD | DEEAQKRKAKESGMALPQGR | GACGAGGAGGCCCAGAAGAG | 6.53304307 |
| | PGQRALYRDVMLENYRNLVF | LTFMDVAIEFSQEEWKSLDP | AAAGGCCAAGGAGAGCGGCA | |
| | L (SEQ ID NO: 317) | GQRALYRDVMLENYRNLVFL | TGGCCCTGCCCCAGGGCAGA | |
| | | GICLPDLSIISMLKQRREPL | CTGACCTTCATGGACGTGGC | |
| | | (SEQ ID NO: 318) | CATCGAGTTCAGCCAGGAGG | |
| | | | AGTGGAAGAGCCTGGACCCC | |
| | | | GGCCAGAGAGCCCTGTACAG | |
| | | | AGATGTGATGCTGGAGAACT | |
| | | | ACAGAAACCTGGTGTTCCTG | |
| | | | GGCATCTGCCTGCCCGACCT | |
| | | | GAGCATCATCAGCATGCTGA | |
| | | | AGCAGAGAAGAGAGCCCCTG | |
| | | | (SEQ ID NO: 1054) | |
| ZN528 | PLKFMDVAIEFSQEEWKCLD | ALTQGPLKFMDVAIEFSQEE | GCCCTGACCCAGGGCCCCCT | 6.5320662 |
| | PAQRTLYRDVMLENYRNLVS | WKCLDPAQRTLYRDVMLENY | GAAGTTCATGGACGTGGCCA | |
| | L (SEQ ID NO: 319) | RNLVSLGICLPDLSVTSMLE | TCGAGTTCAGCCAGGAGGAG | |
| | | QKRDPWTLQSEEKIANDPDG | TGGAAGTGCCTGGACCCCGC | |
| | | (SEQ ID NO: 320) | CCAGAGAACCCTGTACAGAG | |
| | | | ATGTGATGCTGGAGAACTAC | |
| | | | AGAAACCTGGTGAGCCTGGG | |
| | | | CATCTGCCTGCCCGACCTGA | |
| | | | GCGTGACCAGCATGCTGGAG | |
| | | | CAGAAGAGAGACCCCTGGAC | |
| | | | CCTGCAGAGCGAGGAGAAGA | |
| | | | TCGCCAACGACCCCGACGGC | |
| | | | (SEQ ID NO: 1055) | |
| ZN284 | AVTFKDVAVVFTEEELGLLD | TMFKEAVTFKDVAVVFTEEE | ACCATGTTCAAGGAGGCCGT | 6.52062588 |
| | VSQRKLYRDVMLENFRNLLS | LGLLDVSQRKLYRDVMLENF | GACCTTCAAGGACGTGGCCG | |
| | V (SEQ ID NO: 321) | RNLLSVGHQLSHRDTFHFQR | TGGTGTTCACCGAGGAGGAG | |
| | | EEKFWIMETATQREGNSGGK | CTGGGCCTGCTGGACGTGAG | |
| | | (SEQ ID NO: 322) | CCAGAGAAAGCTGTACAGAG | |
| | | | ATGTGATGCTGGAGAACTTC | |
| | | | AGAAACCTGCTGAGCGTGGG | |
| | | | CCACCAGCTGAGCCACAGAG | |
| | | | ACACCTTCCACTTCCAGAGA | |
| | | | GAGGAGAAGTTCTGGATCAT | |
| | | | GGAGACCGCCACCCAGAGAG | |
| | | | AGGGCAACAGCGGCGGCAAG | |
| | | | (SEQ ID NO: 1056) | |
| ZN418 | TVAFEDVAVNFSQEEWSLLS | QGTVAFEDVAVNFSQEEWSL | CAGGGCACCGTGGCCTTCGA | 6.51925026 |
| | EVQRCLYHDVMLENWVLISS | LSEVQRCLYHDVMLENWVLI | GGACGTGGCCGTGAACTTCA | |
| | L (SEQ ID NO: 323) | SSLGCWCGSEDEEAPSKKSI | GCCAGGAGGAGTGGAGCCTG | |
| | | SIQRVSQVSTPGAGVSPKKA | CTGAGCGAGGTGCAGAGATG | |
| | | (SEQ ID NO: 324) | CCTGTACCACGACGTGATGC | |
| | | | TGGAGAACTGGGTGCTGATC | |
| | | | AGCAGCCTGGGCTGCTGGTG | |
| | | | CGGCAGCGAGGACGAGGAGG | |
| | | | CCCCCAGCAAGAAGAGCATC | |
| | | | AGCATCCAGAGAGTGAGCCA | |
| | | | GGTGAGCACCCCCGGCGCCG | |
| | | | GCGTGAGCCCCAAGAAGGCC | |
| | | | (SEQ ID NO: 1057) | |
| MPP8 | FEVEKILDMKTEGGKVLYKV | AEAFGDSEEDGEDVFEVEKI | GCCGAGGCCTTCGGCGACAG | 6.51334634 |
| | RWKGYTSDDDTWEPEIHLED | LDMKTEGGKVLYKVRWKGYT | CGAGGAGGACGGCGAGGACG | |
| | CKEVLLEFRK | SDDDTWEPEIHLEDCKEVLL | TGTTCGAGGTGGAGAAGATC | |
| | (SEQ ID NO: 325) | EFRKKIAENKAKAVRKDIQR | CTGGACATGAAGACCGAGGG | |
| | | (SEQ ID NO: 326) | CGGCAAGGTGCTGTACAAGG | |
| | | | TGAGATGGAAGGGCTACACC | |
| | | | AGCGACGACGACACCTGGGA | |
| | | | GCCCGAGATCCACCTGGAGG | |
| | | | ACTGCAAGGAGGTGCTGCTG | |
| | | | GAGTTCAGAAAGAAGATCGC | |
| | | | CGAGAACAAGGCCAAGGCCG | |
| | | | TGAGAAAGGACATCCAGAGA | |
| | | | (SEQ ID NO: 1058) | |
| ZN490 | SISLEDVAVNFTLEEWALLD | VLQMQNSEHHGQSIKTQTDS | GTGCTGCAGATGCAGAACAG | 6.51148602 |
| | PGQRNIYRDVMRATFKNLAC | ISLEDVAVNFTLEEWALLDP | CGAGCACCACGGCCAGAGCA | |
| | I (SEQ ID NO: 327) | GQRNIYRDVMRATFKNLACI | TCAAGACCCAGACCGACAGC | |
| | | GEKWKDQDIEDEHKNQGRNL | ATCAGCCTGGAGGACGTGGC | |
| | | (SEQ ID NO: 328) | CGTGAACTTCACCCTGGAGG | |
| | | | AGTGGGCCCTGCTGGACCCC | |
| | | | GGCCAGAGAAACATCTACAG | |
| | | | AGATGTGATGAGAGCCACCT | |
| | | | TCAAGAACCTGGCCTGCATC | |
| | | | GGCGAGAAGTGGAAGGACCA | |
| | | | GGACATCGAGGACGAGCACA | |
| | | | AGAACCAGGGCAGAAACCTG | |
| | | | (SEQ ID NO: 1059) | |
| ZN805 | SVTFDDVAVTFTQEEWGQLD | AMALTDPAQVSVTFDDVAVT | GCCATGGCCCTGACCGACCC | 6.50974725 |
| | LAQRTLYQEVMLENCGLLVS | FTQEEWGQLDLAQRTLYQEV | CGCCCAGGTGAGCGTGACCT | |
| | L (SEQ ID NO: 329) | MLENCGLLVSLGCPVPRPEL | TCGACGACGTGGCCGTGACC | |
| | | IYHLEHGQEPWTRKEDLSQG | TTCACCCAGGAGGAGTGGGG | |
| | | (SEQ ID NO: 330) | CCAGCTGGACCTGGCCCAGA | |
| | | | GAACCCTGTACCAGGAGGTG | |
| | | | ATGCTGGAGAACTGCGGCCT | |
| | | | GCTGGTGAGCCTGGGCTGCC | |
| | | | CCGTGCCCAGACCCGAGCTG | |
| | | | ATCTACCACCTGGAGCACGG | |
| | | | CCAGGAGCCCTGGACCAGAA | |
| | | | AGGAGGACCTGAGCCAGGGC | |
| | | | (SEQ ID NO: 1060) | |
| Z780B | SVTFRDVAIDFSQEEWECLQ | VHGSVTFRDVAIDFSQEEWE | GTGCACGGCAGCGTGACCTT | 6.50607891 |
| | PDQRTLYRDVMLENYSHLIS | CLQPDQRTLYRDVMLENYSH | CAGAGATGTGGCCATCGACT | |
| | L (SEQ ID NO: 331) | LISLGSSISKPDVITLLEQE | TCAGCCAGGAGGAGTGGGAG | |
| | | KEPWIVVSKETSRWYPDLES | TGCCTGCAGCCCGACCAGAG | |
| | | (SEQ ID NO: 332) | AACCCTGTACAGAGATGTGA | |
| | | | TGCTGGAGAACTACAGCCAC | |
| | | | CTGATCAGCCTGGGCAGCAG | |
| | | | CATCAGCAAGCCCGACGTGA | |
| | | | TCACCCTGCTGGAGCAGGAG | |
| | | | AAGGAGCCCTGGATCGTGGT | |
| | | | GAGCAAGGAGACCAGCAGAT | |
| | | | GGTACCCCGACCTGGAGAGC | |
| | | | (SEQ ID NO: 1061) | |
| ZN763 | PVACEDVAVNFTQEEWALLD | DPVACEDVAVNFTQEEWALL | GACCCCGTGGCCTGCGAGGA | 6.49330748 |
| | ISQRKLYREVMLETFRNLTS | DISQRKLYREVMLETFRNLT | CGTGGCCGTGAACTTCACCC | |
| | I (SEQ ID NO: 333) | SIGKKWKDQNIEYEYQNPRR | AGGAGGAGTGGGCCCTGCTG | |
| | | NFRSLIEGNVNEIKEDSHCG | GACATCAGCCAGAGAAAGCT | |
| | | (SEQ ID NO: 334) | GTACAGAGAGGTGATGCTGG | |
| | | | AGACCTTCAGAAACCTGACC | |
| | | | AGCATCGGCAAGAAGTGGAA | |
| | | | GGACCAGAACATCGAGTACG | |
| | | | AGTACCAGAACCCCAGAAGA | |
| | | | AACTTCAGAAGCCTGATCGA | |
| | | | GGGCAACGTGAACGAGATCA | |
| | | | AGGAGGACAGCCACTGCGGC | |
| | | | (SEQ ID NO: 1062) | |
| ZN285 | RVTFKDVAVVFTKEELALLD | IKFQERVTFKDVAVVFTKEE | ATCAAGTTCCAGGAGAGAGT | 6.48639829 |
| | KAQINLYQDVMLENFRNLML | LALLDKAQINLYQDVMLENF | GACCTTCAAGGACGTGGCCG | |
| | (SEQ ID NO: 335) | RNLMLVRDGIKNNILNLQAK | TGGTGTTCACCAAGGAGGAG | |
| | | GLSYLSQEVLHCWQIWKQRI | CTGGCCCTGCTGGACAAGGC | |
| | | (SEQ ID NO: 336) | CCAGATCAACCTGTACCAGG | |
| | | | ACGTGATGCTGGAGAACTTC | |
| | | | AGAAACCTGATGCTGGTGAG | |
| | | | AGATGGCATCAAGAACAACA | |
| | | | TCCTGAACCTGCAGGCCAAG | |
| | | | GGCCTGAGCTACCTGAGCCA | |
| | | | GGAGGTGCTGCACTGCTGGC | |
| | | | AGATCTGGAAGCAGAGAATC | |
| | | | (SEQ ID NO: 1063) | |
| ZNF85 | PLTFRDVAIEFSLKEWQCLD | GPLTFRDVAIEFSLKEWQCL | GGCCCCCTGACCTTCAGAGA | 6.48512557 |
| | TAQRNLYRNVMLENYRNLVF | DTAQRNLYRNVMLENYRNLV | TGTGGCCATCGAGTTCAGCC | |
| | L (SEQ ID NO: 337) | FLGITVSKPDLITCLEQGKE | TGAAGGAGTGGCAGTGCCTG | |
| | | AWSMKRHEIMVAKPTVMCSH | GACACCGCCCAGAGAAACCT | |
| | | (SEQ ID NO: 338) | GTACAGAAACGTGATGCTGG | |
| | | | AGAACTACAGAAACCTGGTG | |
| | | | TTCCTGGGCATCACCGTGAG | |
| | | | CAAGCCCGACCTGATCACCT | |
| | | | GCCTGGAGCAGGGCAAGGAG | |
| | | | GCCTGGAGCATGAAGAGACA | |
| | | | CGAGATCATGGTGGCCAAGC | |
| | | | CCACCGTGATGTGCAGCCAC | |
| | | | (SEQ ID NO: 1064) | |
| ZN223 | AVTFKDVAVVFTEEELGLLD | TMSKEAVTFKDVAVVFTEEE | ACCATGAGCAAGGAGGCCGT | 6.48230966 |
| | LAQRKLYRDVMLENFRNLLS | LGLLDLAQRKLYRDVMLENF | GACCTTCAAGGACGTGGCCG | |
| | V (SEQ ID NO: 339) | RNLLSVGHQPFHRDTFHFLR | TGGTGTTCACCGAGGAGGAG | |
| | | EEKFWMMDIATQREGNSGGK | CTGGGCCTGCTGGACCTGGC | |
| | | (SEQ ID NO: 340) | CCAGAGAAAGCTGTACAGAG | |
| | | | ATGTGATGCTGGAGAACTTC | |
| | | | AGAAACCTGCTGAGCGTGGG | |
| | | | CCACCAGCCCTTCCACAGAG | |
| | | | ACACCTTCCACTTCCTGAGA | |
| | | | GAGGAGAAGTTCTGGATGAT | |
| | | | GGACATCGCCACCCAGAGAG | |
| | | | AGGGCAACAGCGGCGGCAAG | |
| | | | (SEQ ID NO: 1065) | |
| ZNF90 | PLEFRDVAIEFSLEEWHCLD | GPLEFRDVAIEFSLEEWHCL | GGCCCCCTGGAGTTCAGAGA | 6.47855756 |
| | TAQQNLYRDVMLENYRHLVF | DTAQQNLYRDVMLENYRHLV | TGTGGCCATCGAGTTCAGCC | |
| | L (SEQ ID NO: 341) | FLGIVVTKPDLITCLEQGKK | TGGAGGAGTGGCACTGCCTG | |
| | | PFTVKRHEMIAKSPVMCFHF | GACACCGCCCAGCAGAACCT | |
| | | (SEQ ID NO: 342) | GTACAGAGATGTGATGCTGG | |
| | | | AGAACTACAGACACCTGGTG | |
| | | | TTCCTGGGCATCGTGGTGAC | |
| | | | CAAGCCCGACCTGATCACCT | |
| | | | GCCTGGAGCAGGGCAAGAAG | |
| | | | CCCTTCACCGTGAAGAGACA | |
| | | | CGAGATGATCGCCAAGAGCC | |
| | | | CCGTGATGTGCTTCCACTTC | |
| | | | (SEQ ID NO: 1066) | |
| ZN557 | LVTFEDVAVEFTQEEWALLD | GHTEGGELVNELLKSWLKGL | GGCCACACCGAGGGGGGCGA | 6.47397343 |
| | PAQRTLYRDVMLENCRNLAS | VTFEDVAVEFTQEEWALLDP | GCTGGTGAACGAGCTGCTGA | |
| | L (SEQ ID NO: 343) | AQRTLYRDVMLENCRNLASL | AGAGCTGGCTGAAGGGCCTG | |
| | | GNQVDKPRLISQLEQEDKVM | GTGACCTTCGAGGACGTGGC | |
| | | (SEQ ID NO: 344) | CGTGGAGTTCACCCAGGAGG | |
| | | | AGTGGGCCCTGCTGGACCCC | |
| | | | GCCCAGAGAACCCTGTACAG | |
| | | | AGATGTGATGCTGGAGAACT | |
| | | | GCAGAAACCTGGCCAGCCTG | |
| | | | GGCAACCAGGTGGACAAGCC | |
| | | | CAGACTGATCAGCCAGCTGG | |
| | | | AGCAGGAGGACAAGGTGATG | |
| | | | (SEQ ID NO: 1067) | |
| ZN425 | TVTFDDVALYFSEQEWEILE | AEPASVTVTFDDVALYFSEQ | GCCGAGCCCGCCAGCGTGAC | 6.47320582 |
| | KWQKQMYKQEMKTNYETLDS | EWEILEKWQKQMYKQEMKTN | CGTGACCTTCGACGACGTGG | |
| | L (SEQ ID NO: 345) | YETLDSLGYAFSKPDLITWM | CCCTGTACTTCAGCGAGCAG | |
| | | EQGRMLLISEQGCLDKTRRT | GAGTGGGAGATCCTGGAGAA | |
| | | (SEQ ID NO: 346) | GTGGCAGAAGCAGATGTACA | |
| | | | AGCAGGAGATGAAGACCAAC | |
| | | | TACGAGACCCTGGACAGCCT | |
| | | | GGGCTACGCCTTCAGCAAGC | |
| | | | CCGACCTGATCACCTGGATG | |
| | | | GAGCAGGGCAGAATGCTGCT | |
| | | | GATCAGCGAGCAGGGCTGCC | |
| | | | TGGACAAGACCAGAAGAACC | |
| | | | (SEQ ID NO: 1068) | |
| ZN229 | PLSFKDVAVVFTEEELELLD | HSQASAISQDREEKIMSQEP | CACAGCCAGGCCAGCGCCAT | 6.47139743 |
| | STQRQLYQDVMQENFRNLLS | LSFKDVAVVFTEEELELLDS | CAGCCAGGACAGAGAGGAGA | |
| | V (SEQ ID NO: 347) | TQRQLYQDVMQENFRNLLSV | AGATCATGAGCCAGGAGCCC | |
| | | GERNPLGDKNGKDTEYIQDE | CTGAGCTTCAAGGACGTGGC | |
| | | (SEQ ID NO: 348) | CGTGGTGTTCACCGAGGAGG | |
| | | | AGCTGGAGCTGCTGGACAGC | |
| | | | ACCCAGAGACAGCTGTACCA | |
| | | | GGACGTGATGCAGGAGAACT | |
| | | | TCAGAAACCTGCTGAGCGTG | |
| | | | GGCGAGAGAAACCCCCTGGG | |
| | | | CGACAAGAACGGCAAGGACA | |
| | | | CCGAGTACATCCAGGACGAG | |
| | | | (SEQ ID NO: 1069) | |
| ZN606 | PVTFKDVAVDFTQEEWGQLD | GSLEEGRRATGLPAAQVQEP | GGCAGCCTGGAGGAGGGCAG | 6.46489693 |
| | LVQRTLYRDVMLETYGHLLS | VTFKDVAVDFTQEEWGQLDL | AAGAGCCACCGGCCTGCCCG | |
| | V (SEQ ID NO: 349) | VQRTLYRDVMLETYGHLLSV | CCGCCCAAGTGCAGGAGCCT | |
| | | GNQIAKPEVISLLEQGEEPW | GTGACCTTCAAGGACGTGGC | |
| | | (SEQ ID NO: 350) | CGTGGACTTCACCCAGGAGG | |
| | | | AGTGGGGCCAGCTGGACCTG | |
| | | | GTGCAGAGAACCCTGTACAG | |
| | | | AGATGTGATGCTGGAGACCT | |
| | | | ACGGCCACCTGCTGAGCGTG | |
| | | | GGCAACCAGATCGCCAAGCC | |
| | | | CGAGGTGATCAGCCTGCTGG | |
| | | | AGCAGGGCGAGGAGCCCTGG | |
| | | | (SEQ ID NO: 1070) | |
| ZN155 | AVTFKDVAVVFTEEELGLLD | TTFKEAVTFKDVAVVFTEEE | ACCACCTTCAAGGAGGCCGT | 6.45744473 |
| | PAQRKLYRDVMLENFRNLLS | LGLLDPAQRKLYRDVMLENF | GACCTTCAAGGACGTGGCCG | |
| | V (SEQ ID NO: 351) | RNLLSVGHQPFHQDTCHFLR | TGGTGTTCACCGAGGAGGAG | |
| | | EEKFWMMGTATQREGNSGGK | CTGGGCCTGCTGGACCCCGC | |
| | | (SEQ ID NO: 352) | CCAGAGAAAGCTGTACAGAG | |
| | | | ATGTGATGCTGGAGAACTTC | |
| | | | AGAAACCTGCTGAGCGTGGG | |
| | | | CCACCAGCCCTTCCACCAGG | |
| | | | ACACCTGCCACTTCCTGAGA | |
| | | | GAGGAGAAGTTCTGGATGAT | |
| | | | GGGCACCGCCACCCAGAGAG | |
| | | | AGGGCAACAGCGGCGGCAAG | |
| | | | (SEQ ID NO: 1071) | |
| ZN222 | AVTFKDVAVIFTEEELGLLD | AKLYEAVTFKDVAVIFTEEE | GCCAAGCTGTACGAGGCCGT | 6.45544011 |
| | PAQRKLYRDVMLENFRNLLS | LGLLDPAQRKLYRDVMLENF | GACCTTCAAGGACGTGGCCG | |
| | V (SEQ ID NO: 353) | RNLLSVGGKIQTEMETVPEA | TGATCTTCACCGAGGAGGAG | |
| | | GTHEEFSCKQIWEQIASDLT | CTGGGCCTGCTGGACCCCGC | |
| | | (SEQ ID NO: 354) | CCAGAGAAAGCTGTACAGAG | |
| | | | ATGTGATGCTGGAGAACTTC | |
| | | | AGAAACCTGCTGAGCGTGGG | |
| | | | GGGCAAGATCCAGACCGAGA | |
| | | | TGGAGACCGTGCCCGAGGCC | |
| | | | GGCACCCACGAGGAGTTCAG | |
| | | | CTGCAAGCAGATCTGGGAGC | |
| | | | AGATCGCCAGCGACCTGACC | |
| | | | (SEQ ID NO: 1072) | |
| ZN442 | SVAFEDVAVNFTQEEWALLG | RSDLFLPDSQTNEERKQYDS | AGAAGCGACCTGTTCCTGCC | 6.44268455 |
| | PSQKSLYRDVMWETIRNLDC | VAFEDVAVNFTQEEWALLGP | CGACAGCCAGACCAACGAGG | |
| | I (SEQ ID NO: 355) | SQKSLYRDVMWETIRNLDCI | AGAGAAAGCAGTACGACAGC | |
| | | GMKWEDTNIEDQHRNPRRSL | GTGGCCTTCGAGGACGTGGC | |
| | | (SEQ ID NO: 356) | CGTGAACTTCACCCAGGAGG | |
| | | | AGTGGGCCCTGCTGGGCCCC | |
| | | | AGCCAGAAGAGCCTGTACAG | |
| | | | AGATGTGATGTGGGAGACCA | |
| | | | TCAGAAACCTGGACTGCATC | |
| | | | GGCATGAAGTGGGAGGACAC | |
| | | | CAACATCGAGGACCAGCACA | |
| | | | GAAACCCCAGAAGAAGCCTG | |
| | | | (SEQ ID NO: 1073) | |
| ZNF91 | LLTFRDVAIEFSPEEWQCLD | PGTPGSLEMGLLTFRDVAIE | CCCGGCACCCCCGGCAGCCT | 6.44174437 |
| | TAQQNLYRNVMLENYRNLAF | FSPEEWQCLDTAQQNLYRNV | GGAGATGGGCCTGCTGACCT | |
| | L (SEQ ID NO: 357) | MLENYRNLAFLGIALSKPDL | TCAGAGATGTGGCCATCGAG | |
| | | ITYLEQGKEPWNMKQHEMVD | TTCAGCCCCGAGGAGTGGCA | |
| | | (SEQ ID NO: 358) | GTGCCTGGACACCGCCCAGC | |
| | | | AGAACCTGTACAGAAACGTG | |
| | | | ATGCTGGAGAACTACAGAAA | |
| | | | CCTGGCCTTCCTGGGCATCG | |
| | | | CCCTGAGCAAGCCCGACCTG | |
| | | | ATCACCTACCTGGAGCAGGG | |
| | | | CAAGGAGCCCTGGAACATGA | |
| | | | AGCAGCACGAGATGGTGGAC | |
| | | | (SEQ ID NO: 1074) | |
| ZN135 | QVTFEDVVVGFSQEEWGQLK | TPGVRVSTDPEQVTFEDVVV | ACCCCCGGCGTGAGAGTGAG | 6.44116741 |
| | PAQRTLYRDVMLDTFRLLVS | GFSQEEWGQLKPAQRTLYRD | CACCGACCCCGAGCAGGTGA | |
| | V (SEQ ID NO: 359) | VMLDTFRLLVSVGHWLPKPN | CCTTCGAGGACGTGGTGGTG | |
| | | VISLLEQEAELWAVESRLPQ | GGCTTCAGCCAGGAGGAGTG | |
| | | (SEQ ID NO: 360) | GGGCCAGCTGAAGCCCGCCC | |
| | | | AGAGAACCCTGTACAGAGAT | |
| | | | GTGATGCTGGACACCTTCAG | |
| | | | ACTGCTGGTGAGCGTGGGCC | |
| | | | ACTGGCTGCCCAAGCCCAAC | |
| | | | GTGATCAGCCTGCTGGAGCA | |
| | | | GGAGGCCGAGCTGTGGGCCG | |
| | | | TGGAGAGCAGACTGCCCCAG | |
| | | | (SEQ ID NO: 1075) | |
| ZN778 | AVTFDDVAVDFTQEEWILLD | EQTQAAGMVAGWLINCYQDA | GAGCAGACCCAGGCCGCCGG | 6.43548986 |
| | PSQRDLYRDVMLENYENLAS | VTFDDVAVDFTQEEWTLLDP | CATGGTGGCCGGCTGGCTGA | |
| | V (SEQ ID NO: 361) | SQRDLYRDVMLENYENLASV | TCAACTGCTACCAGGACGCC | |
| | | EWRLKTKGPALRQDRSWFRA | GTGACCTTCGACGACGTGGC | |
| | | (SEQ ID NO: 362) | CGTGGACTTCACCCAGGAGG | |
| | | | AGTGGACCCTGCTGGACCCC | |
| | | | AGCCAGAGAGACCTGTACAG | |
| | | | AGATGTGATGCTGGAGAACT | |
| | | | ACGAGAACCTGGCCAGCGTG | |
| | | | GAGTGGAGACTGAAGACCAA | |
| | | | GGGCCCCGCCCTGAGACAGG | |
| | | | ACAGAAGCTGGTTCAGAGCC | |
| | | | (SEQ ID NO: 1076) | |
| RYBP | RPRLKNVDRSTAQQLAVTVG | PSEANSIQSANATTKTSETN | CCCAGCGAGGCCAACAGCAT | 6.42734946 |
| | NVTVIITDFKEK | HTSRPRLKNVDRSTAQQLAV | CCAGAGCGCCAACGCCACCA | |
| | (SEQ ID NO: 363) | TVGNVTVIITDFKEKTRSSS | CCAAGACCAGCGAGACCAAC | |
| | | TSSSTVTSSAGSEQQNQSSS | CACACCAGCAGACCCAGACT | |
| | | (SEQ ID NO: 364) | GAAGAACGTGGACAGAAGCA | |
| | | | CCGCCCAGCAGCTGGCCGTG | |
| | | | ACCGTGGGCAACGTGACCGT | |
| | | | GATCATCACCGACTTCAAGG | |
| | | | AGAAGACCAGAAGCAGCAGC | |
| | | | ACCAGCAGCAGCACCGTGAC | |
| | | | CAGCAGCGCCGGCAGCGAGC | |
| | | | AGCAGAACCAGAGCAGCAGC | |
| | | | (SEQ ID NO: 1077) | |
| ZN534 | QLSFSDVAIEFSQEEWKCLD | ALTQGQLSFSDVAIEFSQEE | GCCCTGACCCAGGGCCAGCT | 6.42731382 |
| | PGQKALYRDVMLENYRNLVS | WKCLDPGQKALYRDVMLENY | GAGCTTCAGCGACGTGGCCA | |
| | L (SEQ ID NO: 365) | RNLVSLGEDNVRPEACICSG | TCGAGTTCAGCCAGGAGGAG | |
| | | ICLPDLSVTSMLEQKRDPWT | TGGAAGTGCCTGGACCCCGG | |
| | | (SEQ ID NO: 366) | CCAGAAGGCCCTGTACAGAG | |
| | | | ATGTGATGCTGGAGAACTAC | |
| | | | AGAAACCTGGTGAGCCTGGG | |
| | | | CGAGGACAACGTGAGACCCG | |
| | | | AGGCCTGCATCTGCAGCGGC | |
| | | | ATCTGCCTGCCCGACCTGAG | |
| | | | CGTGACCAGCATGCTGGAGC | |
| | | | AGAAGAGAGACCCCTGGACC | |
| | | | (SEQ ID NO: 1078) | |
| ZN586 | SVTFEDVAVNFSLEEWSLIN | AAAAALRAPAQSSVTFEDVA | GCCGCCGCCGCCGCCCTGAG | 6.41123861 |
| | EAQRCLYRDVMLETLTLISS | VNFSLEEWSLLNEAQRCLYR | AGCCCCCGCCCAGAGCAGCG | |
| | L (SEQ ID NO: 367) | DVMLETLTLISSLGCWHGGE | TTACATTCGAGGACGTGGCC | |
| | | DEAAPSKQSTCIHIYKDQGG | GTGAACTTCAGCCTGGAGGA | |
| | | (SEQ ID NO: 368) | GTGGAGCCTGCTGAACGAGG | |
| | | | CCCAGAGATGCCTGTACAGA | |
| | | | GATGTGATGCTGGAGACCCT | |
| | | | GACCCTGATCAGCAGCCTGG | |
| | | | GCTGCTGGCACGGCGGCGAG | |
| | | | GACGAGGCCGCTCCTAGCAA | |
| | | | GCAGAGCACCTGCATCCACA | |
| | | | TCTACAAGGACCAGGGCGGC | |
| | | | (SEQ ID NO: 1079) | |
| ZN567 | SVSFNDVTVDFTQEEWQHLD | AQGSVSFNDVTVDFTQEEWQ | GCCCAGGGCAGCGTGAGCTT | 6.40288995 |
| | HAQKTLYMDVMLENYCHLIS | HLDHAQKTLYMDVMLENYCH | CAACGACGTGACCGTGGACT | |
| | V (SEQ ID NO: 369) | LISVGCHMTKPDVILKLERG | TCACCCAGGAGGAGTGGCAG | |
| | | EEPWTSFAGHTCLEENWKAE | CACCTGGACCACGCCCAGAA | |
| | | (SEQ ID NO: 370) | GACCCTGTACATGGACGTGA | |
| | | | TGCTGGAGAACTACTGCCAC | |
| | | | CTGATCAGCGTGGGCTGCCA | |
| | | | CATGACCAAGCCCGACGTGA | |
| | | | TCCTGAAGCTGGAGAGAGGC | |
| | | | GAGGAGCCCTGGACCAGCTT | |
| | | | CGCCGGCCACACCTGCCTGG | |
| | | | AGGAGAACTGGAAGGCCGAG | |
| | | | (SEQ ID NO: 1080) | |
| ZN440 | PVAFKDVAVNFTQEEWALLD | DPVAFKDVAVNFTQEEWALL | GACCCCGTGGCCTTCAAGGA | 6.40187146 |
| | ISQRKLYREVMLETFRNLTS | DISQRKLYREVMLETFRNLT | CGTGGCCGTGAACTTCACCC | |
| | L (SEQ ID NO: 371) | SLGKRWKDQNIEYEHQNPRR | AGGAGGAGTGGGCCCTGCTG | |
| | | NFRSLIEEKVNEIKDDSHCG | GACATCAGCCAGAGAAAGCT | |
| | | (SEQ ID NO: 372) | GTACAGAGAGGTGATGCTGG | |
| | | | AGACCTTCAGAAACCTGACC | |
| | | | AGCCTGGGCAAGAGATGGAA | |
| | | | GGACCAGAACATCGAGTACG | |
| | | | AGCACCAGAACCCCAGAAGA | |
| | | | AACTTCAGAAGCCTGATCGA | |
| | | | GGAGAAGGTGAACGAGATCA | |
| | | | AGGACGACAGCCACTGCGGC | |
| | | | (SEQ ID NO: 1081) | |
| ZN583 | LVTFGDVAVNFSQEEWEWLN | SKDLVTFGDVAVNFSQEEWE | AGCAAGGACCTGGTGACCTT | 6.39776145 |
| | PAQRNLYRKVMLENYRSLVS | WLNPAQRNLYRKVMLENYRS | CGGCGACGTGGCCGTGAACT | |
| | L (SEQ ID NO: 373) | LVSLGVSVSKPDVISLLEQG | TCAGCCAGGAGGAGTGGGAG | |
| | | KEPWMVKKEGTRGPCPDWEY | TGGCTGAACCCCGCCCAGAG | |
| | | (SEQ ID NO: 374) | AAACCTGTACAGAAAGGTGA | |
| | | | TGCTGGAGAACTACAGAAGC | |
| | | | CTGGTGAGCCTGGGCGTGAG | |
| | | | CGTGAGCAAGCCCGACGTGA | |
| | | | TCAGCCTGCTGGAGCAGGGC | |
| | | | AAGGAGCCCTGGATGGTGAA | |
| | | | GAAGGAGGGCACCAGAGGCC | |
| | | | CCTGCCCCGACTGGGAGTAC | |
| | | | (SEQ ID NO: 1082) | |
| ZN441 | SVAFEDVAINFTCEEWALLG | DSVAFEDVAINFTCEEWALL | GACAGCGTGGCCTTCGAGGA | 6.38715626 |
| | PSQKSLYRDVMQETIRNLDC | GPSQKSLYRDVMQETIRNLD | CGTGGCCATCAACTTCACCT | |
| | I (SEQ ID NO: 375) | CIGMIWQNHDIEEDQYKDLR | GCGAGGAGTGGGCCCTGCTG | |
| | | RNLRCHMVERACEIKDNSQC | GGCCCCAGCCAGAAGAGCCT | |
| | | (SEQ ID NO: 376) | GTACAGAGATGTGATGCAGG | |
| | | | AGACCATCAGAAACCTGGAC | |
| | | | TGCATCGGCATGATCTGGCA | |
| | | | GAACCACGACATCGAGGAGG | |
| | | | ACCAGTACAAGGACCTGAGA | |
| | | | AGAAACCTGAGATGCCACAT | |
| | | | GGTGGAGAGAGCCTGCGAGA | |
| | | | TCAAGGACAACAGCCAGTGC | |
| | | | (SEQ ID NO: 1083) | |
| ZNF43 | PLTFMDVAIEFCLEEWQCLD | GPLTFMDVAIEFCLEEWQCL | GGCCCCCTGACCTTCATGGA | 6.38246564 |
| | IAQQNLYRNVMLENYRNLVF | DIAQQNLYRNVMLENYRNLV | CGTGGCCATCGAGTTCTGCC | |
| | L (SEQ ID NO: 377) | FLGIAVSKPDLITCLEQEKE | TGGAGGAGTGGCAGTGCCTG | |
| | | PWEPMRRHEMVAKPPVMCSH | GACATCGCCCAGCAGAACCT | |
| | | (SEQ ID NO: 378) | GTACAGAAACGTGATGCTGG | |
| | | | AGAACTACAGAAACCTGGTG | |
| | | | TTCCTGGGCATCGCCGTGAG | |
| | | | CAAGCCCGACCTGATCACCT | |
| | | | GCCTGGAGCAGGAGAAGGAG | |
| | | | CCCTGGGAGCCCATGAGAAG | |
| | | | ACACGAGATGGTGGCCAAGC | |
| | | | CCCCCGTGATGTGCAGCCAC | |
| | | | (SEQ ID NO: 1084) | |
| CBX5 | EPEKIIGATDSCGDLMFLMK | QSNDIARGFERGLEPEKIIG | CAGAGCAACGACATCGCCAG | 6.36905016 |
| | WKDTDEADLVLAKEANVKCP | ATDSCGDLMFLMKWKDTDEA | AGGCTTCGAGAGAGGCCTGG | |
| | QIVIAFYEERLT | DLVLAKEANVKCPQIVIAFY | AGCCCGAGAAGATCATCGGC | |
| | (SEQ ID NO: 379) | EERLTWHAYPEDAENKEKET | GCCACCGACAGCTGCGGCGA | |
| | | (SEQ ID NO: 380) | CCTGATGTTCCTGATGAAGT | |
| | | | GGAAGGACACCGACGAGGCC | |
| | | | GACCTGGTGCTGGCCAAGGA | |
| | | | GGCCAACGTGAAGTGCCCCC | |
| | | | AGATCGTGATCGCCTTCTAC | |
| | | | GAGGAGAGACTGACCTGGCA | |
| | | | CGCCTACCCCGAGGACGCCG | |
| | | | AGAACAAGGAGAAGGAGACC | |
| | | | (SEQ ID NO: 1085) | |
| ZN589 | PVTFEDVAVLFTEAEWKRLS | ALPAKDSAWPWEEKPRYLGP | GCCCTGCCCGCCAAGGACAG | 6.36425087 |
| | LEQRNLYKEVMLENLRNLVS | VTFEDVAVLFTEAEWKRLSL | CGCCTGGCCCTGGGAGGAGA | |
| | (SEQ ID NO: 381) | EQRNLYKEVMLENLRNLVSL | AGCCCAGATACCTGGGCCCC | |
| | | AESKPEVHTCPSCPLAFGSQ | GTGACCTTCGAGGACGTGGC | |
| | | (SEQ ID NO: 382) | CGTGCTGTTCACCGAGGCCG | |
| | | | AGTGGAAGAGACTGAGCCTG | |
| | | | GAGCAGAGAAACCTGTACAA | |
| | | | GGAGGTGATGCTGGAGAACC | |
| | | | TGAGAAACCTGGTGAGCCTG | |
| | | | GCCGAGAGCAAGCCCGAGGT | |
| | | | GCACACCTGCCCCAGCTGCC | |
| | | | CCCTGGCCTTCGGCAGCCAG | |
| | | | (SEQ ID NO: 1086) | |
| ZNF10 | LVTFKDVFVDFTREEWKLLD | DAKSLTAWSRTLVTFKDVFV | GACGCCAAGAGCCTGACCGC | 6.36134473 |
| | TAQQIVYRNVMLENYKNLVS | DFTREEWKLLDTAQQIVYRN | CTGGAGCAGAACCCTGGTGA | |
| | L (SEQ ID NO: 383) | VMLENYKNLVSLGYQLTKPD | CCTTCAAGGACGTGTTCGTG | |
| | | VILRLEKGEEPWLVEREIHQ | GACTTCACCAGAGAGGAGTG | |
| | | (SEQ ID NO: 384) | GAAGCTGCTGGACACCGCCC | |
| | | | AGCAGATCGTGTACAGAAAC | |
| | | | GTGATGCTGGAGAACTACAA | |
| | | | GAACCTGGTGAGCCTGGGCT | |
| | | | ACCAGCTGACCAAGCCCGAC | |
| | | | GTGATCCTGAGACTGGAGAA | |
| | | | GGGCGAGGAGCCCTGGCTGG | |
| | | | TGGAGAGAGAGATCCACCAG | |
| | | | (SEQ ID NO: 1087) | |
| ZN563 | AVAFEDVAVNFTQEEWALLG | DAVAFEDVAVNFTQEEWALL | GACGCCGTGGCCTTCGAGGA | 6.3562145 |
| | PSQKNLYRYVMQETIRNLDC | GPSQKNLYRYVMQETIRNLD | CGTGGCCGTGAACTTCACCC | |
| | (SEQ ID NO: 385) | CIRMIWEEQNTEDQYKNPRR | AGGAGGAGTGGGCCCTGCTG | |
| | | NLRCHMVERFSESKDSSQCG | GGCCCCAGCCAGAAGAACCT | |
| | | (SEQ ID NO: 386) | GTACAGATACGTGATGCAGG | |
| | | | AGACCATCAGAAACCTGGAC | |
| | | | TGCATCAGAATGATCTGGGA | |
| | | | GGAGCAGAACACCGAGGACC | |
| | | | AGTACAAGAACCCCAGAAGA | |
| | | | AACCTGAGATGCCACATGGT | |
| | | | GGAGAGATTCAGCGAGAGCA | |
| | | | AGGACAGCAGCCAGTGCGGC | |
| | | | (SEQ ID NO: 1088) | |
| ZN561 | SVTFDDVAVDFTPEEWALLD | EKTKVERMVEDYLASGYQDS | GAGAAGACCAAGGTGGAGAG | 6.3525504 |
| | TTEKYLYRDVMLENYMNLAS | VTFDDVAVDFTPEEWALLDT | AATGGTGGAGGACTACCTGG | |
| | V (SEQ ID NO: 387) | TEKYLYRDVMLENYMNLASV | CCAGCGGCTACCAGGACAGC | |
| | | EWEIQPRTKRSSLQQGFLKN | GTGACCTTCGACGACGTGGC | |
| | | (SEQ ID NO: 388) | CGTGGACTTCACCCCCGAGG | |
| | | | AGTGGGCCCTGCTGGACACC | |
| | | | ACCGAGAAGTACCTGTACAG | |
| | | | AGATGTGATGCTGGAGAACT | |
| | | | ACATGAACCTGGCCAGCGTG | |
| | | | GAGTGGGAGATCCAGCCCAG | |
| | | | AACCAAGAGAAGCAGCCTGC | |
| | | | AGCAGGGCTTCCTGAAGAAC | |
| | | | (SEQ ID NO: 1089) | |
| ZN136 | SVAFEDVDVNFTQEEWALLD | DSVAFEDVDVNFTQEEWALL | GACAGCGTGGCCTTCGAGGA | 6.35103846 |
| | PSQKNLYRDVMWETMRNLAS | DPSQKNLYRDVMWETMRNLA | CGTGGACGTGAACTTCACCC | |
| | I (SEQ ID NO: 389) | SIGKKWKDQNIKDHYKHRGR | AGGAGGAGTGGGCCCTGCTG | |
| | | NLRSHMLERLYQTKDGSQRG | GACCCCAGCCAGAAGAACCT | |
| | | (SEQ ID NO: 390) | GTACAGAGATGTGATGTGGG | |
| | | | AGACCATGAGAAACCTGGCC | |
| | | | AGCATCGGCAAGAAGTGGAA | |
| | | | GGACCAGAACATCAAGGACC | |
| | | | ACTACAAGCACAGAGGCAGA | |
| | | | AACCTGAGAAGCCACATGCT | |
| | | | GGAGAGACTGTACCAGACCA | |
| | | | AGGACGGCAGCCAGAGAGGC | |
| | | | (SEQ ID NO: 1090) | |
| ZN630 | PVTFEDVAVDFTQEEWQQLN | IESQEPVTFEDVAVDFTQEE | ATCGAGAGCCAGGAGCCCGT | 6.34648094 |
| | PAQKTLHRDVMLETYNHLVS | WQQLNPAQKTLHRDVMLETY | GACCTTCGAGGACGTGGCCG | |
| | V (SEQ ID NO: 391) | NHLVSVGCSGIKPDVIFKLE | TGGACTTCACCCAGGAGGAG | |
| | | HGKDPWIIESELSRWIYPDR | TGGCAGCAGCTGAACCCCGC | |
| | | (SEQ ID NO: 392) | CCAGAAGACCCTGCACAGAG | |
| | | | ATGTGATGCTGGAGACCTAC | |
| | | | AACCACCTGGTGAGCGTGGG | |
| | | | CTGCAGCGGCATCAAGCCCG | |
| | | | ACGTGATCTTCAAGCTGGAG | |
| | | | CACGGCAAGGACCCCTGGAT | |
| | | | CATCGAGAGCGAGCTGAGCA | |
| | | | GATGGATCTACCCCGACAGA | |
| | | | (SEQ ID NO: 1091) | |
| ZN527 | LVTFRDVALDFSQEEWEWLK | AVGLCKAMSQGLVTFRDVAL | GCCGTGGGCCTGTGCAAGGC | 6.34024936 |
| | PSQKDLYRDVMLENYRNLVW | DFSQEEWEWLKPSQKDLYRD | CATGAGCCAGGGCCTGGTGA | |
| | L (SEQ ID NO: 393) | VMLENYRNLVWLGLSISKPN | CCTTCAGAGATGTGGCCCTG | |
| | | MISLLEQGKEPWMVERKMSQ | GACTTCAGCCAGGAGGAGTG | |
| | | (SEQ ID NO: 394) | GGAGTGGCTGAAGCCCAGCC | |
| | | | AGAAGGACCTGTACAGAGAT | |
| | | | GTGATGCTGGAGAACTACAG | |
| | | | AAACCTGGTGTGGCTGGGCC | |
| | | | TGAGCATCAGCAAGCCCAAC | |
| | | | ATGATCAGCCTGCTGGAGCA | |
| | | | GGGCAAGGAGCCCTGGATGG | |
| | | | TGGAGAGAAAGATGAGCCAG | |
| | | | (SEQ ID NO: 1092) | |
| ZN333 | PVTFADVAVVFTPEEWVFLD | DKVEEEAMAPGLPTACSQEP | GACAAGGTGGAGGAGGAGGC | 6.33883721 |
| | STQRSLYRDVMLENYRNLAS | VTFADVAVVFTPEEWVFLDS | CATGGCCCCCGGCCTGCCCA | |
| | (SEQ ID NO: 395) | TQRSLYRDVMLENYRNLASV | CCGCTTGCAGCCAAGAGCCT | |
| | | ADQLCKPNALSYLEERGEQW | GTGACCTTCGCCGACGTGGC | |
| | | (SEQ ID NO: 396) | CGTGGTGTTCACCCCCGAGG | |
| | | | AGTGGGTGTTCCTGGACAGC | |
| | | | ACCCAGAGAAGCCTGTACAG | |
| | | | AGATGTGATGCTGGAGAACT | |
| | | | ACAGAAACCTGGCCAGCGTG | |
| | | | GCCGACCAGCTGTGCAAGCC | |
| | | | CAACGCCCTGAGCTACCTGG | |
| | | | AGGAGAGAGGCGAGCAGTGG | |
| | | | (SEQ ID NO: 1093) | |
| Z324B | MTFEDVAVYFSQEEWG | TFEDVAVYFSQEEWGLLDTA | ACCTTCGAGGACGTGGCCGT | 6.33798774 |
| | LLDTAQRALYRHVMLE | QRALYRHVMLENFTLVTSLG | GTACTTCAGCCAGGAGGAGT | |
| | NFTLVTSL | LSTSRPRVVIQLERGEEPWV | GGGGCCTGCTGGACACCGCC | |
| | (SEQ ID NO: 397) | PSGKDMTLARNTYGRLNSGS | CAGAGAGCCCTGTACAGACA | |
| | | (SEQ ID NO: 398) | CGTGATGCTGGAGAACTTCA | |
| | | | CCCTGGTGACCAGCCTGGGC | |
| | | | CTGAGCACCAGCAGACCCAG | |
| | | | AGTGGTGATCCAGCTGGAGA | |
| | | | GAGGCGAGGAGCCCTGGGTG | |
| | | | CCCAGCGGCAAGGACATGAC | |
| | | | CCTGGCCAGAAACACCTACG | |
| | | | GCAGACTGAACAGCGGCAGC | |
| | | | (SEQ ID NO: 1094) | |
| ZN786 | PLTFEDVAIYFSEQEWQDLE | AEPPRLPLTFEDVAIYFSEQ | GCCGAGCCCCCCAGACTGCC | 6.31659272 |
| | AWQKELYKHVMRSNYETLVS | EWQDLEAWQKELYKHVMRSN | CCTGACCTTCGAGGACGTGG | |
| | L (SEQ ID NO: 399) | YETLVSLDDGLPKPELISWI | CCATCTACTTCAGCGAGCAG | |
| | | EHGGEPFRKWRESQKSGNII | GAGTGGCAGGACCTGGAGGC | |
| | | (SEQ ID NO: 400) | CTGGCAGAAGGAGCTGTACA | |
| | | | AGCACGTGATGAGAAGCAAC | |
| | | | TACGAGACCCTGGTGAGCCT | |
| | | | GGACGACGGCCTGCCCAAGC | |
| | | | CCGAGCTGATCAGCTGGATC | |
| | | | GAGCACGGCGGCGAGCCCTT | |
| | | | CAGAAAGTGGAGAGAGAGCC | |
| | | | AGAAGAGCGGCAACATCATC | |
| | | | (SEQ ID NO: 1095) | |
| ZN709 | SVVFEDVAVNFTQEEWALLG | DSVVFEDVAVNFTQEEWALL | GACAGCGTGGTGTTCGAGGA | 6.31480293 |
| | PSQKKLYRDVMQETFVNLAS | GPSQKKLYRDVMQETFVNLA | CGTGGCCGTGAACTTCACCC | |
| | I (SEQ ID NO: 401) | SIGENWEEKNIEDHKNQGRK | AGGAGGAGTGGGCCCTGCTG | |
| | | LRSHMVERLCERKEGSQFGE | GGCCCCAGCCAGAAGAAGCT | |
| | | (SEQ ID NO: 402) | GTACAGAGATGTGATGCAGG | |
| | | | AGACCTTCGTGAACCTGGCC | |
| | | | AGCATCGGCGAGAACTGGGA | |
| | | | GGAGAAGAACATCGAGGACC | |
| | | | ACAAGAACCAGGGCAGAAAG | |
| | | | CTGAGAAGCCACATGGTGGA | |
| | | | GAGACTGTGCGAGAGAAAGG | |
| | | | AGGGCAGCCAGTTCGGCGAG | |
| | | | (SEQ ID NO: 1096) | |
| ZN792 | CVTFEDVTIYFSQEEWVLLD | AAAALRDPAQGCVTFEDVTI | GCCGCCGCCGCCCTGAGAGA | 6.29907418 |
| | EAQRLLYCDVMLENFALIAS | YFSQEEWVLLDEAQRLLYCD | CCCCGCCCAGGGCTGCGTGA | |
| | L (SEQ ID NO: 403) | VMLENFALIASLGLISFRSH | CCTTCGAAGACGTGACCATC | |
| | | IVSQLEMGKEPWVPDSVDMT | TACTTCAGCCAGGAGGAGTG | |
| | | (SEQ ID NO: 404) | GGTGCTGCTGGACGAGGCCC | |
| | | | AGAGACTGCTGTACTGCGAC | |
| | | | GTGATGCTGGAGAACTTCGC | |
| | | | CCTGATCGCCAGCCTGGGCC | |
| | | | TGATCAGCTTCAGAAGCCAC | |
| | | | ATCGTGAGCCAGCTGGAGAT | |
| | | | GGGCAAGGAGCCCTGGGTGC | |
| | | | CCGACAGCGTGGACATGACC | |
| | | | (SEQ ID NO: 1097) | |
| ZN599 | LVSFEDVVVTFTGEEWGHLD | AAPALALVSFEDVVVTFTGE | GCCGCCCCCGCCCTGGCCCT | 6.29676005 |
| | LAQRTLYQEVMLETCRLLVS | EWGHLDLAQRTLYQEVMLET | GGTGAGCTTCGAGGACGTGG | |
| | L (SEQ ID NO: 405) | CRLLVSLGHPVPKPELIYLL | TGGTGACCTTCACCGGCGAG | |
| | | EHGQELWTVKRGLSQSTCAG | GAGTGGGGCCACCTGGACCT | |
| | | (SEQ ID NO: 406) | GGCCCAGAGAACCCTGTACC | |
| | | | AGGAGGTGATGCTGGAGACC | |
| | | | TGCAGACTGCTGGTGAGCCT | |
| | | | GGGCCACCCCGTGCCCAAGC | |
| | | | CCGAGCTGATCTACCTGCTG | |
| | | | GAGCACGGCCAGGAGCTGTG | |
| | | | GACCGTGAAGAGAGGCCTGA | |
| | | | GCCAGAGCACCTGCGCCGGC | |
| | | | (SEQ ID NO: 1098) | |
| ZN613 | SLTLEDVAVEFTWEEWQLLG | IKSQESLTLEDVAVEFTWEE | ATCAAGAGCCAGGAGAGCCT | 6.28970926 |
| | PAQKDLYRDVMLENYSNLVS | WQLLGPAQKDLYRDVMLENY | GACCCTGGAGGACGTGGCCG | |
| | V (SEQ ID NO: 407) | SNLVSVGYQASKPDALFKLE | TGGAGTTCACCTGGGAGGAG | |
| | | QGEPWTVENEIHSQICPEIK | TGGCAGCTGCTGGGCCCCGC | |
| | | (SEQ ID NO: 408) | CCAGAAGGACCTGTACAGAG | |
| | | | ATGTGATGCTGGAGAACTAC | |
| | | | AGCAACCTGGTGAGCGTGGG | |
| | | | CTACCAGGCCAGCAAGCCCG | |
| | | | ACGCCCTGTTCAAGCTGGAG | |
| | | | CAGGGCGAGCCCTGGACCGT | |
| | | | GGAGAACGAGATCCACAGCC | |
| | | | AGATCTGCCCCGAGATCAAG | |
| | | | (SEQ ID NO: 1099) | |
| ZF69B | LLTFKDVSVDFTQEEWGQLA | GESLESRVTLGSLTAESQEL | GGCGAGAGCCTGGAGAGCAG | 6.28648867 |
| | PAHRNLYREVMLENYGNLVS | LTFKDVSVDFTQEEWGQLAP | AGTGACCCTGGGCAGCCTGA | |
| | V (SEQ ID NO: 409) | AHRNLYREVMLENYGNLVSV | CCGCCGAGAGCCAGGAGCTG | |
| | | GCQLSKPGVISQLEKGEEPW | CTGACCTTCAAGGACGTGAG | |
| | | (SEQ ID NO: 410) | CGTGGACTTCACCCAGGAGG | |
| | | | AGTGGGGCCAGCTGGCCCCC | |
| | | | GCCCACAGAAACCTGTACAG | |
| | | | AGAGGTGATGCTGGAGAACT | |
| | | | ACGGCAACCTGGTGAGCGTG | |
| | | | GGCTGCCAGCTGAGCAAGCC | |
| | | | CGGCGTGATCAGCCAGCTGG | |
| | | | AGAAGGGCGAGGAGCCCTGG | |
| | | | (SEQ ID NO: 1100) | |
| ZN799 | SVALEDVAVNFTREEWALLG | ASVALEDVAVNFTREEWALL | GCCAGCGTGGCCCTGGAGGA | 6.28580406 |
| | PCQKNLYKDVMQETIRNLDC | GPCQKNLYKDVMQETIRNLD | CGTGGCCGTGAACTTCACCA | |
| | V (SEQ ID NO: 411) | CVGMKWKDQNIEDQYRYPRK | GAGAGGAGTGGGCCCTGCTG | |
| | | NLRCRMLERFVESKDGTQCG | GGCCCCTGCCAGAAGAACCT | |
| | | (SEQ ID NO: 412) | GTACAAGGACGTGATGCAGG | |
| | | | AGACCATCAGAAACCTGGAC | |
| | | | TGCGTGGGCATGAAGTGGAA | |
| | | | GGACCAGAACATCGAGGACC | |
| | | | AGTACAGATACCCCAGAAAG | |
| | | | AACCTGAGATGCAGAATGCT | |
| | | | GGAGAGATTCGTGGAGAGCA | |
| | | | AGGACGGCACCCAGTGCGGC | |
| | | | (SEQ ID NO: 1101) | |
| ZN569 | TVTFKDVAIDFTQEEW | TESQGTVTFKDVAIDFTQEE | ACCGAGAGCCAGGGCACCGT | 6.28572758 |
| | KRLDPAQRKLYRNVMLE | WKRLDPAQRKLYRNVMLENY | GACCTTCAAGGACGTGGCCA | |
| | NYNNLITV | NNLITVGYPFTKPDVIFKLE | TCGACTTCACCCAGGAGGAG | |
| | (SEQ ID NO: 413) | QEEEPWVMEEEVLRRHWQGE | TGGAAGAGACTGGACCCCGC | |
| | | (SEQ ID NO: 414) | CCAGAGAAAGCTGTACAGAA | |
| | | | ACGTGATGCTGGAGAACTAC | |
| | | | AACAACCTGATCACCGTGGG | |
| | | | CTACCCCTTCACCAAGCCCG | |
| | | | ACGTGATCTTCAAGCTGGAG | |
| | | | CAGGAGGAGGAGCCCTGGGT | |
| | | | GATGGAGGAGGAGGTGCTGA | |
| | | | GAAGACACTGGCAGGGCGAG | |
| | | | (SEQ ID NO: 1102) | |
| ZN564 | SVASEDVAVNFTLEEWALLD | DSVASEDVAVNFTLEEWALL | GACAGCGTGGCCAGCGAGGA | 6.28268424 |
| | PSQKKLYRDVMRETFRNLAC | DPSQKKLYRDVMRETFRNLA | CGTGGCCGTGAACTTCACCC | |
| | V (SEQ ID NO: 415) | CVGKKWEDQSIEDWYKNQGR | TGGAGGAGTGGGCCCTGCTG | |
| | | ILRNHMEEGLSESKEYDQCG | GACCCCAGCCAGAAGAAGCT | |
| | | (SEQ ID NO: 416) | GTACAGAGATGTGATGAGAG | |
| | | | AGACCTTCAGAAACCTGGCC | |
| | | | TGCGTGGGCAAGAAGTGGGA | |
| | | | GGACCAGAGCATCGAGGACT | |
| | | | GGTACAAGAACCAGGGCAGA | |
| | | | ATCCTGAGAAACCACATGGA | |
| | | | GGAGGGCCTGAGCGAGAGCA | |
| | | | AGGAGTACGACCAGTGCGGC | |
| | | | (SEQ ID NO: 1103) | |
| ZN546 | SLAFRDVSIDLSQEEWECLD | EETQGELTSSCGSKTMANVS | GAGGAGACCCAGGGCGAGCT | 6.27774396 |
| | AVQRDLYKDVMLENYSNLVS | LAFRDVSIDLSQEEWECLDA | GACCAGCAGCTGCGGCAGCA | |
| | L (SEQ ID NO: 417) | VQRDLYKDVMLENYSNLVSL | AGACCATGGCCAACGTGAGC | |
| | | GYTIPKPDVITLLEQEKEPW | CTGGCCTTCAGAGATGTGAG | |
| | | (SEQ ID NO: 418) | CATCGACCTGAGCCAGGAGG | |
| | | | AGTGGGAGTGCCTGGACGCC | |
| | | | GTGCAGAGAGACCTGTACAA | |
| | | | GGACGTGATGCTGGAGAACT | |
| | | | ACAGCAACCTGGTGAGCCTG | |
| | | | GGCTACACCATCCCCAAGCC | |
| | | | CGACGTGATCACCCTGCTGG | |
| | | | AGCAGGAGAAGGAGCCCTGG | |
| | | | (SEQ ID NO: 1104) | |
| ZFP92 | PVSFEDVSVYFTKTEWKLLD | AAILLTTRPKVPVSFEDVSV | GCCGCCATCCTGCTGACCAC | 6.273403 |
| | LRQKVLYKRVMLENYSHLVS | YFTKTEWKLLDLRQKVLYKR | CAGACCCAAGGTGCCCGTGA | |
| | L (SEQ ID NO: 419) | VMLENYSHLVSLGFSFSKPH | GCTTCGAGGACGTGAGCGTG | |
| | | LISQLERGEGPWVADIPRTW | TACTTCACCAAGACCGAGTG | |
| | | (SEQ ID NO: 420) | GAAGCTGCTGGACCTGAGAC | |
| | | | AGAAGGTGCTGTACAAGAGA | |
| | | | GTGATGCTGGAGAACTACAG | |
| | | | CCACCTGGTGAGCCTGGGCT | |
| | | | TCAGCTTCAGCAAGCCCCAC | |
| | | | CTGATCAGCCAGCTGGAGAG | |
| | | | AGGCGAGGGCCCCTGGGTGG | |
| | | | CCGACATCCCCAGAACCTGG | |
| | | | (SEQ ID NO: 1105) | |
| YAF2 | RPRLKNVDRSSAQHLEVTVG | KDKVEKEKSEKETTSKKNSH | AAGGACAAGGTGGAGAAGGA | 6.25768891 |
| | DLTVIITDFKEK | KKTRPRLKNVDRSSAQHLEV | GAAGAGCGAGAAGGAGACCA | |
| | (SEQ ID NO: 421) | TVGDLTVIITDFKEKTKSPP | CCAGCAAGAAGAACAGCCAC | |
| | | ASSAASADQHSQSGSSSDNT | AAGAAGACCAGACCCAGACT | |
| | | (SEQ ID NO: 422) | GAAGAACGTGGACAGAAGCA | |
| | | | GCGCCCAGCACCTGGAGGTG | |
| | | | ACCGTGGGCGACCTGACCGT | |
| | | | GATCATCACCGACTTCAAGG | |
| | | | AGAAGACCAAGAGCCCCCCC | |
| | | | GCCAGCAGCGCCGCCAGCGC | |
| | | | TGACCAACACAGCCAAAGCG | |
| | | | GAAGCAGCAGCGACAACACC | |
| | | | (SEQ ID NO: 1106) | |
| ZN723 | PLTFTDVAIKFSLEEWQFLD | GPLTFTDVAIKFSLEEWQFL | GGCCCCCTGACCTTCACCGA | 6.25047465 |
| | TAQQNLYRDVMLENYRNLVF | DTAQQNLYRDVMLENYRNLV | CGTGGCCATCAAGTTCAGCC | |
| | L (SEQ ID NO: 423) | FLGVGVSKPDLITCLEQGKE | TGGAGGAGTGGCAGTTCCTG | |
| | | PWNMKRHKMVAKPPVVCSHF | GACACCGCCCAGCAGAACCT | |
| | | (SEQ ID NO: 424) | GTACAGAGATGTGATGCTGG | |
| | | | AGAACTACAGAAACCTGGTG | |
| | | | TTCCTGGGCGTGGGCGTGAG | |
| | | | CAAGCCCGACCTGATCACCT | |
| | | | GCCTGGAGCAGGGCAAGGAG | |
| | | | CCCTGGAACATGAAGAGACA | |
| | | | CAAGATGGTGGCCAAGCCCC | |
| | | | CCGTGGTGTGCAGCCACTTC | |
| | | | (SEQ ID NO: 1107) | |
| ZNF34 | EVTFEDVAVYLSREEWGRLG | RKPNPQAMAALFLSAPPQAE | AGAAAGCCCAACCCCCAGGC | 6.23513709 |
| | PAQRGLYRDVMLETYGNLVS | VTFEDVAVYLSREEWGRLGP | CATGGCCGCCCTGTTCCTGA | |
| | L (SEQ ID NO: 425) | AQRGLYRDVMLETYGNLVSL | GCGCCCCCCCTCAAGCCGAA | |
| | | GVGPAGPKPGVISQLERGDE | GTGACCTTCGAGGACGTGGC | |
| | | (SEQ ID NO: 426) | CGTGTACCTGAGCAGAGAGG | |
| | | | AGTGGGGCAGACTGGGCCCC | |
| | | | GCCCAGAGAGGCCTGTACAG | |
| | | | AGATGTGATGCTGGAGACCT | |
| | | | ACGGCAACCTGGTGAGCCTG | |
| | | | GGCGTGGGCCCCGCCGGACC | |
| | | | CAAACCTGGAGTGATCAGCC | |
| | | | AGCTGGAGAGAGGCGACGAG | |
| | | | (SEQ ID NO: 1108) | |
| ZN439 | PVAFKDVAVNFTQEEWALLD | LSLSPILLYTCEMFQDPVAF | CTGAGCCTGAGCCCCATCCT | 6.22934428 |
| | ISQKNLYREVMLETFWNLTS | KDVAVNFTQEEWALLDISQK | GCTGTACACCTGCGAGATGT | |
| | I (SEQ ID NO: 427) | NLYREVMLETFWNLTSIGKK | TCCAGGACCCCGTGGCCTTC | |
| | | WKDQNIEYEYQNPRRNFRSV | AAGGACGTGGCCGTGAACTT | |
| | | (SEQ ID NO: 428) | CACCCAGGAGGAGTGGGCCC | |
| | | | TGCTGGACATCAGCCAGAAG | |
| | | | AACCTGTACAGAGAGGTGAT | |
| | | | GCTGGAGACCTTCTGGAACC | |
| | | | TGACCAGCATCGGCAAGAAG | |
| | | | TGGAAGGACCAGAACATCGA | |
| | | | GTACGAGTACCAGAACCCCA | |
| | | | GAAGAAACTTCAGAAGCGTG | |
| | | | (SEQ ID NO: 1109) | |
| ZFP57 | PVTFEDVAVNFTQEEWDCLD | AAGEPRSLLFFQKPVTFEDV | GCCGCCGGCGAGCCCAGAAG | 6.2234497 |
| | ASQRVLYQDVMSETFKNLTS | AVNFTQEEWDCLDASQRVLY | CCTGCTGTTCTTCCAGAAGC | |
| | (SEQ ID NO: 429) | QDVMSETFKNLTSVARIFLH | CCGTGACCTTCGAGGACGTG | |
| | | KPELITKLEQEEEQWRETRV | GCCGTGAACTTCACCCAGGA | |
| | | (SEQ ID NO: 430) | GGAGTGGGACTGCCTGGACG | |
| | | | CCAGCCAGAGAGTGCTGTAC | |
| | | | CAGGACGTGATGAGCGAGAC | |
| | | | CTTCAAGAACCTGACCAGCG | |
| | | | TGGCCAGAATCTTCCTGCAC | |
| | | | AAGCCCGAGCTGATCACCAA | |
| | | | GCTGGAGCAGGAGGAGGAGC | |
| | | | AGTGGAGAGAGACCAGAGTG | |
| | | | (SEQ ID NO: 1110) | |
| ZNF19 | MVTFEDVAVHFTKTEWTGLS | AAMPLKAQYQEMVTFEDVAV | GCCGCCATGCCCCTGAAGGC | 6.21632085 |
| | PAQRALYRSVMLENFGNLTA | HFTKTEWTGLSPAQRALYRS | CCAGTACCAGGAGATGGTGA | |
| | L (SEQ ID NO: 431) | VMLENFGNLTALGYPVPKPA | CCTTCGAGGACGTGGCCGTG | |
| | | LISLLERGDMAWGLEAQDDP | CACTTCACCAAGACCGAGTG | |
| | | (SEQ ID NO: 432) | GACCGGCCTGAGCCCCGCCC | |
| | | | AGAGAGCCCTGTACAGAAGC | |
| | | | GTGATGCTGGAGAACTTCGG | |
| | | | CAACCTGACCGCCCTGGGCT | |
| | | | ACCCCGTGCCCAAGCCCGCC | |
| | | | CTGATCAGCCTGCTGGAGAG | |
| | | | AGGCGACATGGCCTGGGGCC | |
| | | | TGGAGGCCCAGGACGACCCC | |
| | | | (SEQ ID NO: 1111) | |
| ZN404 | PLTFSDVAIDFSQEEWEYLN | ARVPLTFSDVAIDFSQEEWE | GCCAGAGTGCCCCTGACCTT | 6.20126205 |
| | SDQRDLYRDVMLENYTNLVS | YLNSDQRDLYRDVMLENYTN | CAGCGACGTGGCCATCGACT | |
| | L (SEQ ID NO: 433) | LVSLDFNFTTESNKLSSEKR | TCAGCCAGGAGGAGTGGGAG | |
| | | NYEVNAYHQETWKRNKTFNL | TACCTGAACAGCGACCAGAG | |
| | | (SEQ ID NO: 434) | AGACCTGTACAGAGATGTGA | |
| | | | TGCTGGAGAACTACACCAAC | |
| | | | CTGGTGAGCCTGGACTTCAA | |
| | | | CTTCACCACCGAGAGCAACA | |
| | | | AGCTGAGCAGCGAGAAGAGA | |
| | | | AACTACGAGGTGAACGCCTA | |
| | | | CCACCAGGAGACCTGGAAGA | |
| | | | GAAACAAGACCTTCAACCTG | |
| | | | (SEQ ID NO: 1112) | |
| ZN274 | PVTFEDVTLGFTPEEWGLID | ASRLPTAWSCEPVTFEDVTL | GCCAGCAGACTGCCCACCGC | 6.19652061 |
| | LKQKSLYREVMLENYRNLVS | GFTPEEWGLLDLKQKSLYRE | CTGGAGCTGCGAGCCCGTGA | |
| | V (SEQ ID NO: 435) | VMLENYRNLVSVEHQLSKPD | CCTTCGAGGACGTGACCCTG | |
| | | VVSQLEEAEDFWPVERGIPQ | GGCTTCACCCCCGAGGAGTG | |
| | | (SEQ ID NO: 436) | GGGCCTGCTGGACCTGAAGC | |
| | | | AGAAGAGCCTGTACAGAGAG | |
| | | | GTGATGCTGGAGAACTACAG | |
| | | | AAACCTGGTGAGCGTGGAGC | |
| | | | ACCAGCTGAGCAAGCCCGAC | |
| | | | GTGGTGAGCCAGCTGGAGGA | |
| | | | GGCCGAGGACTTCTGGCCCG | |
| | | | TGGAGAGAGGCATCCCCCAG | |
| | | | (SEQ ID NO: 1113) | |
| CBX3 | DPERIIGATDSSGELMFLMK | SKKKRDAADKPRGFARGLDP | AGCAAGAAGAAGAGAGATGC | 6.19641648 |
| | WKDSDEADLVLAKEANMKCP | ERIIGATDSSGELMFLMKWK | CGCCGACAAGCCCAGAGGCT | |
| | QIVIAFYEERLT | DSDEADLVLAKEANMKCPQI | TCGCCAGAGGCCTGGACCCC | |
| | (SEQ ID NO: 437) | VIAFYEERLTWHSCPEDEAQ | GAGAGAATCATCGGCGCCAC | |
| | | (SEQ ID NO: 438) | CGACAGCAGCGGCGAGCTGA | |
| | | | TGTTCCTGATGAAGTGGAAG | |
| | | | GACAGCGACGAGGCCGACCT | |
| | | | GGTGCTGGCCAAGGAGGCCA | |
| | | | ACATGAAGTGCCCCCAGATC | |
| | | | GTGATCGCCTTCTACGAGGA | |
| | | | GAGACTGACCTGGCACAGCT | |
| | | | GCCCCGAGGACGAGGCCCAG | |
| | | | (SEQ ID NO: 1114) | |
| ZNF30 | SVTFEDVAIAFSQQEWESLD | AHKYVGLQYHGSVTFEDVAI | GCCCACAAGTACGTGGGCCT | 6.19503476 |
| | SSQRGLYRDVMLENYRNLVS | AFSQQEWESLDSSQRGLYRD | GCAGTACCACGGCAGCGTGA | |
| | M (SEQ ID NO: 439) | VMLENYRNLVSMGHSRSKPH | CCTTCGAGGACGTGGCCATC | |
| | | VIALLEQWKEPEVTVRKDGR | GCCTTCAGCCAGCAGGAGTG | |
| | | (SEQ ID NO: 440) | GGAGAGCCTGGACAGCAGCC | |
| | | | AGAGAGGCCTGTACAGAGAT | |
| | | | GTGATGCTGGAGAACTACAG | |
| | | | AAACCTGGTGAGCATGGGCC | |
| | | | ACAGCAGAAGCAAGCCCCAC | |
| | | | GTGATCGCCCTGCTGGAGCA | |
| | | | GTGGAAGGAGCCCGAGGTGA | |
| | | | CCGTGAGAAAGGACGGCAGA | |
| | | | (SEQ ID NO: 1115) | |
| ZN250 | KLTFEDVAVLLSQDEWDRLC | AAARLLPVPAGPQPLSFQAK | GCCGCCGCCAGACTGCTGCC | 6.17058573 |
| | PAQRGLYRNVMMETYGNVVS | LTFEDVAVLLSQDEWDRLCP | CGTGCCCGCCGGCCCCCAAC | |
| | L (SEQ ID NO: 441) | AQRGLYRNVMMETYGNVVSL | CTCTTAGCTTCCAGGCCAAG | |
| | | GLPGSKPDIISQLERGEDPW | CTGACCTTCGAGGACGTGGC | |
| | | (SEQ ID NO: 442) | CGTGCTGCTGAGCCAGGACG | |
| | | | AGTGGGACAGACTGTGCCCC | |
| | | | GCCCAGAGAGGCCTGTACAG | |
| | | | AAACGTGATGATGGAGACCT | |
| | | | ACGGCAACGTGGTGAGCCTG | |
| | | | GGCCTGCCCGGCAGCAAGCC | |
| | | | CGACATCATCAGCCAGCTGG | |
| | | | AGAGAGGCGAGGACCCCTGG | |
| | | | (SEQ ID NO: 1116) | |
| ZN570 | LVTFRDVAVDFSQEEWDCLD | AVGLLKAMYQELVTFRDVAV | GCCGTGGGCCTGCTGAAGGC | 6.16932644 |
| | SSQRHLYSNVMLENYRILVS | DFSQEEWDCLDSSQRHLYSN | CATGTACCAGGAGCTGGTGA | |
| | L (SEQ ID NO: 443) | VMLENYRILVSLGLCFSKPS | CCTTCAGAGATGTGGCCGTG | |
| | | VILLLEQGKAPWMVKRELTK | GACTTCAGCCAGGAGGAGTG | |
| | | (SEQ ID NO: 444) | GGACTGCCTGGACAGCAGCC | |
| | | | AGAGACACCTGTACAGCAAC | |
| | | | GTGATGCTGGAGAACTACAG | |
| | | | AATCCTGGTGAGCCTGGGCC | |
| | | | TGTGCTTCAGCAAGCCCAGC | |
| | | | GTGATCCTGCTGCTGGAGCA | |
| | | | GGGCAAGGCCCCCTGGATGG | |
| | | | TGAAGAGAGAGCTGACCAAG | |
| | | | (SEQ ID NO: 1117) | |
| ZN675 | LLTFRDVAIEFSLEEWQCLD | GLLTFRDVAIEFSLEEWQCL | GGCCTGCTGACCTTCAGAGA | 6.15995772 |
| | TAQRNLYKNVILENYRNLVF | DTAQRNLYKNVILENYRNLV | TGTGGCCATCGAGTTCAGCC | |
| | L (SEQ ID NO: 445) | FLGIAVSKQDLITCLEQEKE | TGGAGGAGTGGCAGTGCCTG | |
| | | PLTVKRHEMVNEPPVMCSHF | GACACCGCCCAGAGAAACCT | |
| | | (SEQ ID NO: 446 | GTACAAGAACGTGATCCTGG | |
| | | | AGAACTACAGAAACCTGGTG | |
| | | | TTCCTGGGCATCGCCGTGAG | |
| | | | CAAGCAGGACCTGATCACCT | |
| | | | GCCTGGAGCAGGAGAAGGAG | |
| | | | CCCCTGACCGTGAAGAGACA | |
| | | | CGAGATGGTGAACGAGCCCC | |
| | | | CCGTGATGTGCAGCCACTTC | |
| | | | (SEQ ID NO: 1118) | |
| ZN695 | LLAFRDVALEFSPEEWECLD | GLLAFRDVALEFSPEEWECL | GGCCTGCTGGCCTTCAGAGA | 6.15609798 |
| | PAQRSLYRDVMLENYRNLIS | DPAQRSLYRDVMLENYRNLI | TGTGGCCCTGGAGTTCAGCC | |
| | L (SEQ ID NO: 447) | SLGEDSFNMQFLFHSLAMSK | CCGAGGAGTGGGAGTGCCTG | |
| | | PELIICLEARKEPWNVNTEK | GACCCCGCCCAGAGAAGCCT | |
| | | (SEQ ID NO: 448) | GTACAGAGATGTGATGCTGG | |
| | | | AGAACTACAGAAACCTGATC | |
| | | | AGCCTGGGCGAGGACAGCTT | |
| | | | CAACATGCAGTTCCTGTTCC | |
| | | | ACAGCCTGGCCATGAGCAAG | |
| | | | CCCGAGCTGATCATCTGCCT | |
| | | | GGAGGCCAGAAAGGAGCCCT | |
| | | | GGAACGTGAACACCGAGAAG | |
| | | | (SEQ ID NO: 1119) | |
| ZN548 | RVVFEDVAIYFSQEEWGHLD | NLTEGRVVFEDVAIYFSQEE | AACCTGACCGAGGGCAGAGT | 6.14238152 |
| | EAQRLLYRDVMLENLALLSS | WGHLDEAQRLLYRDVMLENL | GGTGTTCGAGGACGTGGCCA | |
| | L (SEQ ID NO: 449 | ALLSSLGSWHGAEDEEAPSQ | TCTACTTCAGCCAGGAGGAG | |
| | | QGFSVGVSEVTASKPCLSSQ | TGGGGCCACCTGGACGAGGC | |
| | | (SEQ ID NO: 450) | CCAGAGACTGCTGTACAGAG | |
| | | | ATGTGATGCTGGAGAACCTG | |
| | | | GCCCTGCTGAGCAGCCTGGG | |
| | | | CAGCTGGCACGGCGCCGAGG | |
| | | | ACGAAGAGGCCCCTAGCCAG | |
| | | | CAGGGCTTCAGCGTGGGCGT | |
| | | | GAGCGAGGTGACCGCCAGCA | |
| | | | AGCCCTGCCTGAGCAGCCAG | |
| | | | (SEQ ID NO: 1120) | |
| ZN227 | AVTFKDVAVVFSREELRLLD | SQNYDLPQKKQEKMTKFQEA | AGCCAGAACTACGACCTGCC | 6.13508917 |
| | LTQRKLYRDVMVENFKNLVA | VTFKDVAVVFSREELRLLDL | CCAGAAGAAGCAGGAGAAGA | |
| | V (SEQ ID NO: 451) | TQRKLYRDVMVENFKNLVAV | TGACCAAGTTCCAGGAGGCC | |
| | | GHLPFQPDMVSQLEAEEKLW | GTGACCTTCAAGGACGTGGC | |
| | | (SEQ ID NO: 452) | CGTGGTGTTCAGCAGAGAGG | |
| | | | AGCTGAGACTGCTGGACCTG | |
| | | | ACCCAGAGAAAGCTGTACAG | |
| | | | AGATGTGATGGTGGAGAACT | |
| | | | TCAAGAACCTGGTGGCCGTG | |
| | | | GGCCACCTGCCCTTCCAGCC | |
| | | | CGACATGGTGAGCCAGCTGG | |
| | | | AGGCCGAGGAGAAGCTGTGG | |
| | | | (SEQ ID NO: 1121) | |
| ZN132 | MVTFEDVAVYFSQEEWELLD | GPAQHTSWPCGSAVPTLKSM | GGCCCCGCCCAGCACACCAG | 6.13316124 |
| | AAQRHLYHSVMLENLELVTS | VTFEDVAVYFSQEEWELLDA | CTGGCCCTGCGGCAGCGCCG | |
| | L (SEQ ID NO: 453) | AQRHLYHSVMLENLELVTSL | TTCCTACACTGAAGAGCATG | |
| | | GSWHGVEGEGAHPKQNVSVE | GTGACCTTCGAGGACGTGGC | |
| | | (SEQIDNO:454) | CGTGTACTTCAGCCAGGAGG | |
| | | | AGTGGGAGCTGCTGGACGCC | |
| | | | GCCCAGAGACACCTGTACCA | |
| | | | CAGCGTGATGCTGGAGAACC | |
| | | | TGGAGCTGGTGACCAGCCTG | |
| | | | GGCAGCTGGCACGGCGTGGA | |
| | | | GGGCGAGGGAGCTCACCCCA | |
| | | | AGCAGAACGTGAGCGTGGAG | |
| | | | (SEQ ID NO: 1122) | |
| ZN738 | PLTFRDVVIEFSQEEWQCLD | SGYPGAERNLLEYSYFEKGP | AGCGGCTACCCCGGCGCCGA | 6.12742065 |
| | TAQQDLYRKVMLENFRNLVF | LTFRDVVIEFSQEEWQCLDT | GAGAAACCTGCTGGAGTACA | |
| | L (SEQ ID NO: 455) | AQQDLYRKVMLENFRNLVFL | GCTACTTCGAGAAGGGCCCC | |
| | | GIDVSKPDLITCLEQGKDPW | CTGACCTTCAGAGATGTGGT | |
| | | (SEQ ID NO: 456) | GATCGAGTTCAGCCAGGAGG | |
| | | | AGTGGCAGTGCCTGGACACC | |
| | | | GCCCAGCAGGACCTGTACAG | |
| | | | AAAGGTGATGCTGGAGAACT | |
| | | | TCAGAAACCTGGTGTTCCTG | |
| | | | GGCATCGACGTGAGCAAGCC | |
| | | | CGACCTGATCACCTGCCTGG | |
| | | | AGCAGGGCAAGGACCCCTGG | |
| | | | (SEQ ID NO: 1123) | |
| ZN420 | LVMFRDVAIDFSQEEWECLD | ARKLVMFRDVAIDFSQEEWE | GCCAGAAAGCTGGTGATGTT | 6.1074573 |
| | SAQRDLYRDVMLENYSNLVS | CLDSAQRDLYRDVMLENYSN | CAGAGATGTGGCCATCGACT | |
| | L (SEQ ID NO: 457) | LVSLDLPSRCASKDLSPEKN | TCAGCCAGGAGGAGTGGGAG | |
| | | TYETELSQWEMSDRLENCDL | TGCCTGGACAGCGCCCAGAG | |
| | | (SEQ ID NO: 458) | AGACCTGTACAGAGATGTGA | |
| | | | TGCTGGAGAACTACAGCAAC | |
| | | | CTGGTGAGCCTGGACCTGCC | |
| | | | CAGCAGATGCGCCAGCAAGG | |
| | | | ACCTGAGCCCCGAGAAGAAC | |
| | | | ACCTACGAGACCGAGCTGAG | |
| | | | CCAGTGGGAGATGAGCGACA | |
| | | | GACTGGAGAACTGCGACCTG | |
| | | | (SEQ ID NO: 1124) | |
| ZN514 | MTFEDVAVEFSQWEWGQLNP | TFEDVAVEFSQWEWGQLNPA | ACCTTCGAGGACGTGGCCGT | 6.10685195 |
| | AQKDLYREVMLENFRNLAIL | QKDLYREVMLENFRNLAILG | GGAGTTCAGCCAGTGGGAGT | |
| | (SEQ ID NO: 459) | LLVSKPYVICQLEEGGEPFM | GGGGCCAGCTGAACCCCGCC | |
| | | VEREISTGAHSDWKRRSKSK | CAGAAGGACCTGTACAGAGA | |
| | | (SEQ ID NO: 460) | GGTGATGCTGGAGAACTTCA | |
| | | | GAAACCTGGCCATCCTGGGC | |
| | | | CTGCTGGTGAGCAAGCCCTA | |
| | | | CGTGATCTGCCAGCTGGAGG | |
| | | | AGGGCGGCGAGCCCTTCATG | |
| | | | GTGGAGAGAGAGATCAGCAC | |
| | | | CGGCGCCCACAGCGACTGGA | |
| | | | AGAGAAGAAGCAAGAGCAAG | |
| | | | (SEQ ID NO: 1125) | |
| ZN626 | PLQFRDVAIEFSLEEWHQLD | GPLQFRDVAIEFSLEEWHQL | GGCCCCCTGCAGTTCAGAGA | 6.10541852 |
| | TAQRNLYRNVMLENYSNLVF | DTAQRNLYRNVMLENYSNLV | TGTGGCCATCGAGTTCAGCC | |
| | L (SEQ ID NO: 461) | FLGITVSKPDLITCLEQGRK | TGGAGGAGTGGCACTGCCTG | |
| | | PLTMKRNEMIAKPSVMCSHF | GACACCGCCCAGAGAAACCT | |
| | | (SEQ ID NO: 462) | GTACAGAAACGTGATGCTGG | |
| | | | AGAACTACAGCAACCTGGTG | |
| | | | TTCCTGGGCATCACCGTGAG | |
| | | | CAAGCCCGACCTGATCACCT | |
| | | | GCCTGGAGCAGGGCAGAAAG | |
| | | | CCCCTGACCATGAAGAGAAA | |
| | | | CGAGATGATCGCCAAGCCCA | |
| | | | GCGTGATGTGCAGCCACTTC | |
| | | | (SEQ ID NO: 1126) | |
| ZN806 | RVTFKDIAVIFTKEELAVLD | IKFQERVTFKDIAVIFTKEE | ATCAAGTTCCAGGAGAGAGT | 6.09805184 |
| | KAQINLYQDVMLENFRNFIS | LAVLDKAQINLYQDVMLENF | GACCTTCAAGGACATCGCCG | |
| | V (SEQ ID NO: 463) | RNFISVDGIKNNILNLQGKG | TGATCTTCACCAAGGAGGAG | |
| | | LIYLSQEELHCWKIWKQRIR | CTGGCCGTGCTGGACAAGGC | |
| | | (SEQ ID NO: 464) | CCAGATCAACCTGTACCAGG | |
| | | | ACGTGATGCTGGAGAACTTC | |
| | | | AGAAACTTCATCAGCGTGGA | |
| | | | CGGCATCAAGAACAACATCC | |
| | | | TGAACCTGCAGGGCAAGGGC | |
| | | | CTGATCTACCTGAGCCAGGA | |
| | | | GGAGCTGCACTGCTGGAAGA | |
| | | | TCTGGAAGCAGAGAATCAGA | |
| | | | (SEQ ID NO: 1127) | |
| ZN559 | SVTFEDVAVDFTQEEWTLLD | VAGWLTNYSQDSVTFEDVAV | GTGGCCGGCTGGCTGACCAA | 6.09618421 |
| | QTQRNLYRDVMLENYKNLVA | DFTQEEWTLLDQTQRNLYRD | CTACAGCCAGGACAGCGTGA | |
| | V (SEQ ID NO: 465) | VMLENYKNLVAVDWESHINT | CCTTCGAGGACGTGGCCGTG | |
| | | KWSAPQQNFLQGKTSSVVEM | GACTTCACCCAGGAGGAGTG | |
| | | (SEQ ID NO: 466) | GACCCTGCTGGACCAGACCC | |
| | | | AGAGAAACCTGTACAGAGAT | |
| | | | GTGATGCTGGAGAACTACAA | |
| | | | GAACCTGGTGGCCGTGGACT | |
| | | | GGGAGAGCCACATCAACACC | |
| | | | AAGTGGAGCGCCCCCCAGCA | |
| | | | GAACTTCCTGCAGGGCAAGA | |
| | | | CCAGCAGCGTGGTGGAGATG | |
| | | | (SEQ ID NO: 1128) | |
| ZN460 | SVTFEDVAVTFTQEEWGQLD | AAAWMAPAQESVTFEDVAVT | GCCGCCGCCTGGATGGCCCC | 6.08494207 |
| | VTQRALYVEVMLETCGLLVA | FTQEEWGQLDVTQRALYVEV | CGCCCAGGAGAGCGTGACCT | |
| | L (SEQ ID NO: 467) | MLETCGLLVALGDSTKPETV | TCGAGGACGTGGCCGTGACC | |
| | | EPIPSHLALPEEVSLQEQLA | TTCACCCAGGAGGAGTGGGG | |
| | | (SEQ ID NO: 468) | CCAGCTGGACGTGACCCAGA | |
| | | | GAGCCCTGTACGTGGAGGTG | |
| | | | ATGCTGGAGACCTGCGGCCT | |
| | | | GCTGGTGGCCCTGGGCGACA | |
| | | | GCACCAAGCCCGAGACCGTG | |
| | | | GAGCCCATCCCCAGCCACCT | |
| | | | GGCCCTGCCCGAGGAAGTGA | |
| | | | GCCTGCAGGAGCAGCTGGCC | |
| | | | (SEQ ID NO: 1129) | |
| ZN268 | PLSFMDVFVDFTWEEWQLLD | VLEWLFISQEQPKITKSWGP | GTGCTGGAGTGGCTGTTCAT | 6.040812 |
| | PAQKCLYRSVMLENYSNLVS | LSFMDVFVDFTWEEWQLLDP | CAGCCAGGAGCAGCCCAAGA | |
| | L (SEQ ID NO: 469) | AQKCLYRSVMLENYSNLVSL | TCACCAAGAGCTGGGGCCCC | |
| | | GYQHTKPDIIFKLEQGEELC | CTGAGCTTCATGGACGTGTT | |
| | | (SEQ ID NO: 470) | CGTGGACTTCACCTGGGAGG | |
| | | | AGTGGCAGCTGCTGGACCCC | |
| | | | GCCCAGAAGTGCCTGTACAG | |
| | | | AAGCGTGATGCTGGAGAACT | |
| | | | ACAGCAACCTGGTGAGCCTG | |
| | | | GGCTACCAGCACACCAAGCC | |
| | | | CGACATCATCTTCAAGCTGG | |
| | | | AGCAGGGCGAGGAGCTGTGC | |
| | | | (SEQ ID NO: 1130) | |
| ZN304 | CVTFEDVFVYFSREEWELLE | AAAVLMDRVQSCVTFEDVFV | GCCGCCGCCGTGCTGATGGA | 6.03800144 |
| | EAQRFLYRDVMLENFALVAT | YFSREEWELLEEAQRFLYRD | CAGAGTGCAGAGCTGCGTGA | |
| | L (SEQ ID NO: 471) | VMLENFALVATLGFWCEAEH | CCTTCGAGGACGTGTTCGTG | |
| | | EAPSEQSVSVEGVSQVRTAE | TACTTCAGCAGAGAGGAGTG | |
| | | (SEQ ID NO: 472) | GGAGCTGCTGGAGGAGGCCC | |
| | | | AGAGATTCCTGTACAGAGAT | |
| | | | GTGATGCTGGAGAACTTCGC | |
| | | | CCTGGTGGCCACCCTGGGCT | |
| | | | TCTGGTGCGAGGCCGAGCAC | |
| | | | GAGGCTCCCAGCGAGCAGAG | |
| | | | CGTGAGCGTGGAGGGCGTGA | |
| | | | GCCAGGTGAGAACCGCCGAG | |
| | | | (SEQ ID NO: 1131) | |
| ZIM2 | LVTFEDVLVDFSPEELSSLS | AGSQFPDFKHLGTFLVFEEL | GCCGGCAGCCAGTTCCCCGA | 6.03746453 |
| | AAQRNLYREVMLENYRNLVS | VTFEDVLVDFSPEELSSLSA | CTTCAAGCACCTGGGCACCT | |
| | L (SEQ ID NO: 473 | AQRNLYREVMLENYRNLVSL | TCCTGGTGTTCGAGGAGCTG | |
| | | GHQFSKPDIISRLEEEESYA | GTGACCTTCGAGGACGTGCT | |
| | | (SEQ ID NO: 474) | GGTGGACTTCAGCCCCGAGG | |
| | | | AGCTGAGCAGCCTGAGCGCC | |
| | | | GCCCAGAGAAACCTGTACAG | |
| | | | AGAGGTGATGCTGGAGAACT | |
| | | | ACAGAAACCTGGTGAGCCTG | |
| | | | GGCCACCAGTTCAGCAAGCC | |
| | | | CGACATCATCAGCAGACTGG | |
| | | | AGGAGGAGGAGAGCTACGCC | |
| | | | (SEQ ID NO: 1132) | |
| ZN605 | QISFEDVAVDFTLEEWQLLN | IQSQISFEDVAVDFTLEEWQ | ATCCAGAGCCAGATCAGCTT | 6.01346476 |
| | PTQKNLYRDVMLENYSNLVF | LLNPTQKNLYRDVMLENYSN | CGAGGACGTGGCCGTGGACT | |
| | L (SEQ ID NO: 475) | LVFLEVWLDNPKMWLRDNQD | TCACCCTGGAGGAGTGGCAG | |
| | | NLKSMERGHKYDVFGKIFNS | CTGCTGAACCCCACCCAGAA | |
| | | (SEQ ID NO: 476) | GAACCTGTACAGAGATGTGA | |
| | | | TGCTGGAGAACTACAGCAAC | |
| | | | CTGGTGTTCCTGGAGGTGTG | |
| | | | GCTGGACAACCCCAAGATGT | |
| | | | GGCTGAGAGACAACCAGGAC | |
| | | | AACCTGAAGAGCATGGAGAG | |
| | | | AGGCCACAAGTACGACGTGT | |
| | | | TCGGCAAGATCTTCAACAGC | |
| | | | (SEQ ID NO: 1133) | |
| ZN844 | LVAFEDVAVNFTQEEWSLLD | DLVAFEDVAVNFTQEEWSLL | GACCTGGTGGCCTTCGAGGA | 5.98806163 |
| | PSQKNLYREVMQETLRNLAS | DPSQKNLYREVMQETLRNLA | CGTGGCCGTGAACTTCACCC | |
| | I (SEQ ID NO: 477) | SIGEKWKDQNIEDQYKNPRN | AGGAGGAGTGGAGCCTGCTG | |
| | | NLRSLLGERVDENTEENHCG | GACCCCAGCCAGAAGAACCT | |
| | | (SEQ ID NO: 478) | GTACAGAGAGGTGATGCAGG | |
| | | | AGACCCTGAGAAACCTGGCC | |
| | | | AGCATCGGCGAGAAGTGGAA | |
| | | | GGACCAGAACATCGAGGACC | |
| | | | AGTACAAGAACCCCAGAAAC | |
| | | | AACCTGAGAAGCCTGCTGGG | |
| | | | CGAGAGAGTGGACGAGAACA | |
| | | | CCGAGGAGAACCACTGCGGC | |
| | | | (SEQ ID NO: 1134) | |
| SUMQ5 | IKLRVIGQDSSEIHFKVKMT | KDEDIKLRVIGQDSSEIHFK | AAGGACGAGGACATCAAGCT | 5.96583945 |
| | TPLKKLKKSYCQRQGVPVNS | VKMTTPLKKLKKSYCQRQGV | GAGAGTGATCGGCCAGGACA | |
| | LRFLFEGQRIADNHTPEELG | PVNSLRFLFEGQRIADNHTP | GCAGCGAGATCCACTTCAAG | |
| | MEEEDVIEVY | EELGMEEEDVIEVYQEQIGG | GTGAAGATGACCACCCCCCT | |
| | (SEQ ID NO: 479) | (SEQ ID NO: 480) | GAAGAAGCTGAAGAAGAGCT | |
| | | | ACTGCCAGAGACAGGGCGTG | |
| | | | CCCGTGAACAGCCTGAGATT | |
| | | | CCTGTTCGAGGGCCAGAGAA | |
| | | | TCGCCGACAACCACACCCCC | |
| | | | GAGGAGCTGGGCATGGAGGA | |
| | | | GGAGGACGTGATCGAGGTGT | |
| | | | ACCAGGAGCAGATCGGCGGC | |
| | | | (SEQ ID NO: 1135) | |
| ZN101 | SVAFEDVAVNFTQEEWALLS | DSVAFEDVAVNFTQEEWALL | GACAGCGTGGCCTTCGAGGA | 5.90648424 |
| | PSQKNLYRDVTLETFRNLAS | SPSQKNLYRDVTLETFRNLA | CGTGGCCGTGAACTTCACCC | |
| | V (SEQ ID NO: 481) | SVGIQWKDQDIENLYQNLGI | AGGAGGAGTGGGCCCTGCTG | |
| | | KLRSLVERLCGRKEGNEHRE | AGCCCCAGCCAGAAGAACCT | |
| | | (SEQ ID NO: 482) | GTACAGAGATGTGACCCTGG | |
| | | | AGACCTTCAGAAACCTGGCC | |
| | | | AGCGTGGGCATCCAGTGGAA | |
| | | | GGACCAGGACATCGAGAACC | |
| | | | TGTACCAGAACCTGGGCATC | |
| | | | AAGCTGAGAAGCCTGGTGGA | |
| | | | GAGACTGTGCGGCAGAAAGG | |
| | | | AGGGCAACGAGCACAGAGAG | |
| | | | (SEQ ID NO: 1136) | |
| ZN783 | PVTFDDVAVYFSELEWGKLE | RNFWILRLPPGSKGEAPKVP | AGAAACTTCTGGATCCTGAG | 5.87160607 |
| | DWQKELYKHVMRGNYETLVS | VTFDDVAVYFSELEWGKLED | ACTGCCCCCCGGCAGCAAGG | |
| | L (SEQ ID NO: 483) | WQKELYKHVMRGNYETLVSL | GCGAGGCCCCCAAGGTGCCC | |
| | | DYAISKPDILTRIERGEEPC | GTGACATTCGACGACGTGGC | |
| | | (SEQ ID NO: 484) | CGTGTACTTCAGCGAGCTGG | |
| | | | AGTGGGGCAAGCTGGAGGAC | |
| | | | TGGCAGAAGGAGCTGTACAA | |
| | | | GCACGTGATGAGAGGCAACT | |
| | | | ACGAGACCCTGGTGAGCCTG | |
| | | | GACTACGCCATCAGCAAGCC | |
| | | | CGACATCCTGACCAGAATCG | |
| | | | AGAGAGGCGAGGAGCCCTGC | |
| | | | (SEQ ID NO: 1137) | |
| ZN417 | TVTFEDVAVNFSQEEWCLLS | AAAAPRRPTQQGTVTFEDVA | GCCGCCGCCGCCCCCAGAAG | 5.85910987 |
| | EAQRCLYRDVMLENLALISS | VNFSQEEWCLLSEAQRCLYR | ACCCACCCAGCAGGGCACCG | |
| | L (SEQ ID NO: 485) | DVMLENLALISSLGCWCGSK | TGACCTTCGAGGACGTGGCC | |
| | | DEEAPCKQRISVQRESQSRT | GTGAACTTCAGCCAGGAGGA | |
| | | (SEQ ID NO: 486) | GTGGTGCCTGCTGAGCGAGG | |
| | | | CCCAGAGATGCCTGTACAGA | |
| | | | GATGTGATGCTGGAGAACCT | |
| | | | GGCCCTGATCAGCAGCCTGG | |
| | | | GCTGCTGGTGCGGCAGCAAG | |
| | | | GACGAGGAGGCCCCCTGCAA | |
| | | | GCAGAGAATCAGCGTGCAGA | |
| | | | GAGAGAGCCAGAGCAGAACC | |
| | | | (SEQ ID NO: 1138) | |
| ZN182 | LVTFEDVAVDFTQEEWQYLN | SGEDSGSFYSWQKAKREQGL | AGCGGCGAGGACAGCGGCAG | 5.80251318 |
| | PPQRTLYRDVMLETYSNLVF | VTFEDVAVDFTQEEWQYLNP | CTTCTACAGCTGGCAGAAGG | |
| | V (SEQ ID NO: 487) | PQRTLYRDVMLETYSNLVFV | CCAAGAGAGAGCAGGGCCTG | |
| | | GQQVTKPNLILKLEVEECPA | GTGACCTTCGAGGACGTGGC | |
| | | (SEQ ID NO: 488) | CGTGGACTTCACCCAGGAGG | |
| | | | AGTGGCAGTACCTGAACCCC | |
| | | | CCCCAGAGAACCCTGTACAG | |
| | | | AGATGTGATGCTGGAGACCT | |
| | | | ACAGCAACCTGGTGTTCGTG | |
| | | | GGCCAGCAGGTGACCAAGCC | |
| | | | CAACCTGATCCTGAAGCTGG | |
| | | | AGGTGGAGGAGTGCCCCGCC | |
| | | | (SEQ ID NO: 1139) | |
| ZN823 | SVAFEDVAVNFTQEEWALLG | DSVAFEDVAVNFTQEEWALL | GACAGCGTGGCCTTCGAGGA | 5.75436578 |
| | PSQKSLYRNVMQETIRNLDC | GPSQKSLYRNVMQETIRNLD | CGTGGCCGTGAACTTCACCC | |
| | I (SEQ ID NO: 489) | CIEMKWEDQNIGDQCQNAKR | AGGAGGAGTGGGCCCTGCTG | |
| | | NLRSHTCEIKDDSQCGETFG | GGCCCCAGCCAGAAGAGCCT | |
| | | (SEQ ID NO: 490) | GTACAGAAACGTGATGCAGG | |
| | | | AGACCATCAGAAACCTGGAC | |
| | | | TGCATCGAGATGAAGTGGGA | |
| | | | GGACCAGAACATCGGCGACC | |
| | | | AGTGCCAGAACGCCAAGAGA | |
| | | | AACCTGAGAAGCCACACCTG | |
| | | | CGAGATCAAGGACGACAGCC | |
| | | | AGTGCGGCGAGACCTTCGGC | |
| | | | (SEQ ID NO: 1140) | |
| ZN177 | SVTFQEVAVDFSQEEWALLD | AAGWLTTWSQNSVTFQEVAV | GCCGCCGGCTGGCTGACCAC | 5.66150299 |
| | PAQKNLYKDVMLENFRNLAS | DFSQEEWALLDPAQKNLYKD | CTGGAGCCAGAACAGCGTGA | |
| | V (SEQ ID NO: 491) | VMLENFRNLASVGYQLCRHS | CCTTCCAGGAGGTGGCCGTG | |
| | | LISKVDQEQLKTDERGILQG | GACTTCAGCCAGGAGGAGTG | |
| | | (SEQDNO:492) | GGCCCTGCTGGACCCCGCCC | |
| | | | AGAAGAACCTGTACAAGGAC | |
| | | | GTGATGCTGGAGAACTTCAG | |
| | | | AAACCTGGCCAGCGTGGGCT | |
| | | | ACCAGCTGTGCAGACACAGC | |
| | | | CTGATCAGCAAGGTGGACCA | |
| | | | GGAGCAGCTGAAGACCGACG | |
| | | | AGAGAGGCATCCTGCAGGGC | |
| | | | (SEQ ID NO: 1141) | |
| ZN197 | LVMFEEVSVCFTSEEWACLG | ENPRNQLMALMLLTAQPQEL | GAGAACCCCAGAAACCAGCT | 5.65816459 |
| | PIQRALYWDVMLENYGNVTS | VMFEEVSVCFTSEEWACLGP | GATGGCCCTGATGCTGCTGA | |
| | L (SEQ ID NO: 493) | IQRALYWDVMLENYGNVTSL | CCGCCCAGCCCCAGGAGCTG | |
| | | EWETMTENEEVTSKPSSSQR | GTGATGTTCGAGGAGGTGAG | |
| | | (SEQ ID NO: 494) | CGTGTGCTTCACCAGCGAGG | |
| | | | AGTGGGCCTGCCTGGGCCCC | |
| | | | ATCCAGAGAGCCCTGTACTG | |
| | | | GGACGTGATGCTGGAGAACT | |
| | | | ACGGCAACGTGACCAGCCTG | |
| | | | GAGTGGGAGACCATGACCGA | |
| | | | GAACGAGGAGGTGACCAGCA | |
| | | | AGCCCAGCAGCAGCCAGAGA | |
| | | | (SEQ ID NO: 1142) | |
| ZN717 | LVSFEEVAVHFTWEEWQDLD | LETYNSLVSLQELVSFEEVA | CTGGAGACCTACAACAGCCT | 5.64802359 |
| | DAQRTLYRDVMLETYSSLVS | VHFTWEEWQDLDDAQRTLYR | GGTGAGCCTGCAGGAGCTGG | |
| | L (SEQ ID NO: 495) | DVMLETYSSLVSLGHCITKP | TGAGCTTCGAGGAGGTGGCC | |
| | | EMIFKLEQGAEPWIVEETPN | GTGCACTTCACCTGGGAGGA | |
| | | (SEQ ID NO: 496) | GTGGCAGGACCTGGACGACG | |
| | | | CCCAGAGAACCCTGTACAGA | |
| | | | GATGTGATGCTGGAGACCTA | |
| | | | CAGCAGCCTGGTGAGCCTGG | |
| | | | GCCACTGCATCACCAAGCCC | |
| | | | GAGATGATCTTCAAGCTGGA | |
| | | | GCAGGGCGCCGAGCCCTGGA | |
| | | | TCGTGGAGGAGACCCCCAAC | |
| | | | (SEQ ID NO: 1143) | |
| ZN669 | SVAFEDVAVNFTQEEWALLD | RHFRRPEPCREPLASPIQDS | AGACACTTCAGAAGACCCGA | 5.58623836 |
| | SSQKNLYREVMQETCRNLAS | VAFEDVAVNFTQEEWALLDS | GCCCTGCAGAGAGCCCCTGG | |
| | V (SEQ ID NO: 497) | SQKNLYREVMQETCRNLASV | CCAGCCCCATCCAGGACAGC | |
| | | GSQWKDQNIEDHFEKPGKDI | GTGGCCTTCGAGGACGTGGC | |
| | | (SEQ ID NO: 498) | CGTGAACTTCACCCAGGAGG | |
| | | | AGTGGGCCCTGCTGGACAGC | |
| | | | AGCCAGAAGAACCTGTACAG | |
| | | | AGAGGTGATGCAGGAGACCT | |
| | | | GCAGAAACCTGGCCAGCGTG | |
| | | | GGCAGCCAGTGGAAGGACCA | |
| | | | GAACATCGAGGACCACTTCG | |
| | | | AGAAGCCCGGCAAGGACATC | |
| | | | (SEQ ID NO: 1144) | |
| ZN256 | IVTFEDVAVYFSWKEWGLLD | AAAELTAPAQGIVTFEDVAV | GCCGCCGCCGAGCTGACCGC | 5.57864488 |
| | EAQKCLYHDVMLENLTLTTS | YFSWKEWGLLDEAQKCLYHD | CCCCGCCCAGGGCATCGTGA | |
| | L (SEQ ID NO: 499) | VMLENLTLTTSLGGSGAGDE | CCTTCGAAGACGTGGCCGTG | |
| | | EAPYQQSTSPQRVSQVRIPK | TACTTCAGCTGGAAGGAGTG | |
| | | (SEQ ID NO: 500) | GGGCCTGCTGGACGAGGCCC | |
| | | | AGAAGTGCCTGTACCACGAC | |
| | | | GTGATGCTGGAGAACCTGAC | |
| | | | CCTGACCACCAGCCTGGGCG | |
| | | | GCAGCGGCGCCGGAGATGAG | |
| | | | GAGGCTCCTTACCAGCAGAG | |
| | | | CACCAGCCCCCAGAGAGTGA | |
| | | | GCCAGGTGAGAATCCCCAAG | |
| | | | (SEQ ID NO: 1145) | |
| ZN251 | PLTFQDVAVYFSQAEGRQLG | AATFQLPGHQEMPLTFQDVA | GCCGCCACCTTCCAGCTGCC | 5.54680119 |
| | PQQRALYRDVMLENYGNVAS | VYFSQAEGRQLGPQQRALYR | CGGCCACCAGGAGATGCCCC | |
| | L (SEQ ID NO: 501) | DVMLENYGNVASLGFPVPKP | TGACCTTCCAGGACGTGGCC | |
| | | ELISQLEQGKELWVLNLLGA | GTGTACTTCAGCCAGGCCGA | |
| | | (SEQ ID NO: 502) | GGGCAGACAGCTGGGCCCCC | |
| | | | AGCAGAGAGCCCTGTACAGA | |
| | | | GATGTGATGCTGGAGAACTA | |
| | | | CGGCAACGTGGCCAGCCTGG | |
| | | | GCTTCCCCGTGCCCAAGCCC | |
| | | | GAGCTGATCAGCCAGCTGGA | |
| | | | GCAGGGCAAGGAGCTGTGGG | |
| | | | TGCTGAACCTGCTGGGCGCC | |
| | | | (SEQ ID NO: 1146) | |
| CBX4 | SEFKPFFGNIIITDVTANCL | RSEAGEPPSSLQVKPETPAS | AGAAGCGAGGCCGGCGAGCC | 5.47206529 |
| | TVTFKEYVT | AAVAVAAAAAPTTTAEKPPA | CCCCAGCAGCCTGCAGGTGA | |
| | (SEQ ID NO: 503) | EAQDEPAESLSEFKPFFGNI | AGCCCGAGACACCTGCCAGC | |
| | | IITDVTANCLTVTFKEYVTV | GCCGCTGTGGCCGTGGCTGC | |
| | | (SEQ ID NO: 504) | TGCTGCTGCTCCCACCACCA | |
| | | | CAGCCGAGAAGCCCCCCGCC | |
| | | | GAGGCCCAGGACGAACCTGC | |
| | | | CGAGAGCCTGAGCGAGTTCA | |
| | | | AGCCCTTCTTCGGCAACATC | |
| | | | ATCATCACCGACGTGACCGC | |
| | | | CAACTGCCTGACCGTGACCT | |
| | | | TCAAGGAGTACGTGACCGTG | |
| | | | (SEQ ID NO: 1147) | |
| PCGF2 | MCALCGGYFIDATTIVECLH | HRTTRIKITELNPHLMCALC | CACAGAACCACCAGAATCAA | 5.41711547 |
| | SFCKTCIVRYLETNKYCPM | GGYFIDATTIVECLHSFCKT | GATCACCGAGCTGAACCCCC | |
| | (SEQ ID NO: 505) | CIVRYLETNKYCPMCDVQVH | ACCTGATGTGCGCCCTGTGC | |
| | | KTRPLLSIRSDKTLQDIVYK | GGCGGCTACTTCATCGACGC | |
| | | (SEQ ID NO: 506) | CACCACCATCGTGGAGTGCC | |
| | | | TGCACAGCTTCTGCAAGACC | |
| | | | TGCATCGTGAGATACCTGGA | |
| | | | GACCAACAAGTACTGCCCCA | |
| | | | TGTGCGACGTGCAGGTGCAC | |
| | | | AAGACCAGACCCCTGCTGAG | |
| | | | CATCAGAAGCGACAAGACCC | |
| | | | TGCAGGACATCGTGTACAAG | |
| | | | (SEQ ID NO: 1148) | |
| CDY2 | FEVEAIVDKRQDKNGNTQYL | ASQEFEVEAIVDKRQDKNGN | GCCAGCCAGGAGTTCGAGGT | 5.20865573 |
| | VRWKGYDKQDDTWEPEQHLM | TQYLVRWKGYDKQDDTWEPE | GGAGGCCATCGTGGACAAGA | |
| | NCEKCVHDFNR | QHLMNCEKCVHDFNRRQTEK | GACAGGACAAGAACGGCAAC | |
| | (SEQ ID NO: 507) | QKKLTWTTTSRIFSNNARRR | ACCCAGTACCTGGTGAGATG | |
| | | (SEQ ID NO: 508) | GAAGGGCTACGACAAGCAGG | |
| | | | ACGACACCTGGGAGCCCGAG | |
| | | | CAGCACCTGATGAACTGCGA | |
| | | | GAAGTGCGTGCACGACTTCA | |
| | | | ACAGAAGACAGACCGAGAAG | |
| | | | CAGAAGAAGCTGACCTGGAC | |
| | | | CACCACCAGCAGAATCTTCA | |
| | | | GCAACAACGCCAGAAGAAGA | |
| | | | (SEQ ID NO: 1149) | |
| CDYL2 | YEVERIVDKRKNKKGKWEYL | ASGDLYEVERIVDKRKNKKG | GCCAGCGGCGACCTGTACGA | 5.17777542 |
| | IRWKGYGSTEDTWEPEHHLL | KWEYLIRWKGYGSTEDTWEP | GGTGGAGAGAATCGTGGACA | |
| | HCEEFIDEFN | EHHLLHCEEFIDEFNGLHMS | AGAGAAAGAACAAGAAGGGC | |
| | (SEQ ID NO: 509) | KDKRIKSGKQSSTSKLLRDS | AAGTGGGAGTACCTGATCAG | |
| | | (SEQ ID NO: 510) | ATGGAAGGGCTACGGCAGCA | |
| | | | CCGAGGACACCTGGGAGCCC | |
| | | | GAGCACCACCTGCTGCACTG | |
| | | | CGAGGAGTTCATCGACGAGT | |
| | | | TCAACGGCCTGCACATGAGC | |
| | | | AAGGACAAGAGAATCAAGAG | |
| | | | CGGCAAGCAGAGCAGCACCA | |
| | | | GCAAGCTGCTGAGAGACAGC | |
| | | | (SEQ ID NO: 1150) | |
| ZN287 | SMTFKDVAVDITQEDWELMR | PRGKHAFQTGWLNDLVTKES | CCCAGAGGCAAGCACGCCTT | 5.15786106 |
| | PVQKELYKTVTLQNYWNMVS | MTFKDVAVDITQEDWELMRP | CCAGACCGGCTGGCTGAACG | |
| | L (SEQ ID NO: 511) | VQKELYKTVTLQNYWNMVSL | ACCTGGTGACCAAGGAGAGC | |
| | | GLTVYRPTVIPILEEPWMVI | ATGACCTTCAAGGACGTGGC | |
| | | (SEQ ID NO: 512) | CGTGGACATCACCCAGGAGG | |
| | | | ACTGGGAGCTGATGAGACCC | |
| | | | GTGCAGAAGGAGCTGTACAA | |
| | | | GACCGTGACCCTGCAGAACT | |
| | | | ACTGGAACATGGTGAGCCTG | |
| | | | GGCCTGACCGTGTACAGACC | |
| | | | CACCGTGATCCCCATCCTGG | |
| | | | AGGAGCCCTGGATGGTGATC | |
| | | | (SEQ ID NO: 1151) | |
| HERC2 | RKADLENHNKDGGFWTVIDG | TLIRKADLENHNKDGGFWTV | ACCCTGATCAGAAAGGCCGA | 5.12990133 |
| | KVYDIKDFQTQSLTGNSILA | IDGKVYDIKDFQTQSLTGNS | CCTGGAGAACCACAACAAGG | |
| | QFAGEDPVVALEAALQFEDT | ILAQFAGEDPVVALEAALQF | ACGGCGGCTTCTGGACCGTG | |
| | RESMHAFCVGQY | EDTRESMHAFCVGQYLEPDQ | ATCGACGGCAAGGTGTACGA | |
| | (SEQ ID NO: 513) | (SEQ ID NO: 514) | CATCAAGGACTTCCAGACCC | |
| | | | AGAGCCTGACCGGCAACAGC | |
| | | | ATCCTGGCCCAGTTCGCCGG | |
| | | | CGAGGACCCCGTGGTGGCCC | |
| | | | TGGAAGCTGCTCTGCAGTTC | |
| | | | GAGGACACCAGAGAGAGCAT | |
| | | | GCACGCCTTCTGCGTGGGCC | |
| | | | AGTACCTGGAGCCCGACCAG | |
| | | | (SEQ ID NO: 1152) | |
| ZN562 | SVTFDDVAVEFTPEEWALLD | EKTKIGTMVEDHRSNSYQDS | GAGAAGACCAAGATCGGCAC | 5.08331004 |
| | TTQKYLYRDVMLENYMNLAS | VTFDDVAVEFTPEEWALLDT | CATGGTGGAGGACCACAGAA | |
| | V (SEQ ID NO: 515) | TQKYLYRDVMLENYMNLASV | GCAACAGCTACCAGGACAGC | |
| | | DFFFCLTSEWEIQPRTKRSS | GTGACCTTCGACGACGTGGC | |
| | | (SEQ ID NO: 516) | CGTGGAGTTCACCCCCGAGG | |
| | | | AGTGGGCCCTGCTGGACACC | |
| | | | ACCCAGAAGTACCTGTACAG | |
| | | | AGATGTGATGCTGGAGAACT | |
| | | | ACATGAACCTGGCCAGCGTG | |
| | | | GACTTCTTCTTCTGCCTGAC | |
| | | | CAGCGAGTGGGAGATCCAGC | |
| | | | CCAGAACCAAGAGAAGCAGC | |
| | | | (SEQ ID NO: 1153) | |
| ZN461 | LVMFRDVAIDVSQEEWECLN | AHELVMFRDVAIDVSQEEWE | GCCCACGAGCTGGTGATGTT | 5.05101639 |
| | PAQRNLYKEVMLENYSNLVS | CLNPAQRNLYKEVMLENYSN | CAGAGATGTGGCCATCGACG | |
| | L (SEQ ID NO: 517) | LVSLGLSVSKPAVISSLEQG | TGAGCCAGGAGGAGTGGGAG | |
| | | KEPWMVVREETGRWCPGTWK | TGCCTGAACCCCGCCCAGAG | |
| | | (SEQ ID NO: 518) | AAACCTGTACAAGGAGGTGA | |
| | | | TGCTGGAGAACTACAGCAAC | |
| | | | CTGGTGAGCCTGGGCCTGAG | |
| | | | CGTGAGCAAGCCCGCCGTGA | |
| | | | TCAGCAGCCTGGAGCAGGGC | |
| | | | AAGGAGCCCTGGATGGTGGT | |
| | | | GAGAGAGGAGACCGGCAGAT | |
| | | | GGTGCCCCGGCACCTGGAAG | |
| | | | (SEQ ID NO: 1154) | |
| Z324A | MAFEDVAVYFSQEEWGLLDT | AFEDVAVYFSQEEWGLLDTA | GCCTTCGAGGACGTGGCCGT | 5.01043067 |
| | AQRALYRRVMLDNFALVASL | QRALYRRVMLDNFALVASLG | GTACTTCAGCCAGGAGGAGT | |
| | (SEQ ID NO: 519) | LSTSRPRVVIQLERGEEPWV | GGGGCCTGCTGGACACCGCC | |
| | | PSGTDTTLSRTTYRRRNPGS | CAGAGAGCCCTGTACAGAAG | |
| | | (SEQ ID NO: 520) | AGTGATGCTGGACAACTTCG | |
| | | | CCCTGGTGGCCAGCCTGGGC | |
| | | | CTGAGCACCAGCAGACCCAG | |
| | | | AGTGGTGATCCAGCTGGAGA | |
| | | | GAGGCGAGGAGCCCTGGGTG | |
| | | | CCCAGCGGCACCGACACCAC | |
| | | | CCTGAGCAGAACCACCTACA | |
| | | | GAAGAAGAAACCCCGGCAGC | |
| | | | (SEQ ID NO: 1155) | |
| ZN766 | HLTFRDVAIEFSQEEWKCLD | AQLRRGHLTFRDVAIEFSQE | GCCCAGCTGAGAAGAGGCCA | 4.9926318 |
| | PVQKALYRDVMLENYRNLVS | EWKCLDPVQKALYRDVMLEN | CCTGACCTTCAGAGATGTGG | |
| | L (SEQ ID NO: 521) | YRNLVSLGICLPDLSIISMM | CCATCGAGTTCAGCCAGGAG | |
| | | KQRTEPWTVENEMKVAKNPD | GAGTGGAAGTGCCTGGACCC | |
| | | (SEQ ID NO: 522) | CGTGCAGAAGGCCCTGTACA | |
| | | | GAGATGTGATGCTGGAGAAC | |
| | | | TACAGAAACCTGGTGAGCCT | |
| | | | GGGCATCTGCCTGCCCGACC | |
| | | | TGAGCATCATCAGCATGATG | |
| | | | AAGCAGAGAACCGAGCCCTG | |
| | | | GACCGTGGAGAACGAGATGA | |
| | | | AGGTGGCCAAGAACCCCGAC | |
| | | | (SEQ ID NO: 1156) | |
| ID2 | LLYNMNDCYSKLKELVPSIP | SDHSLGISRSKTPVDDPMSL | AGCGACCACAGCCTGGGCAT | 4.86972562 |
| | QNKKVSKMEILQHVIDYILD | LYNMNDCYSKLKELVPSIPQ | CAGCAGAAGCAAGACCCCCG | |
| | L (SEQ ID NO: 523) | NKKVSKMEILQHVIDYILDL | TGGACGACCCCATGAGCCTG | |
| | | QIALDSHPTIVSLHHQRPGQ | CTGTACAACATGAACGACTG | |
| | | (SEQ ID NO: 524 | CTACAGCAAGCTGAAGGAGC | |
| | | | TGGTGCCCAGCATCCCCCAG | |
| | | | AACAAGAAGGTGAGCAAGAT | |
| | | | GGAGATCCTGCAGCACGTGA | |
| | | | TCGACTACATCCTGGACCTG | |
| | | | CAGATCGCCCTGGACAGCCA | |
| | | | CCCCACCATCGTGAGCCTGC | |
| | | | ACCACCAGAGACCCGGCCAG | |
| | | | (SEQ ID NO: 1157) | |
| TQX | PQKPVSAYALFFRDTQAAIK | KDPNEPQKPVSAYALFFRDT | AAGGACCCCAACGAGCCCCA | 4.84737013 |
| | GQNPNATFGEVSKIVASMWD | QAAIKGQNPNATFGEVSKIV | GAAGCCCGTGAGCGCCTACG | |
| | GLGEEQKQVYKKKTEAAKKE | ASMWDGLGEEQKQVYKKKTE | CCCTGTTCTTCAGAGACACC | |
| | YLKQLAAY | AAKKEYLKQLAAYRASLVSK | CAGGCCGCCATCAAGGGCCA | |
| | (SEQ ID NO: 525) | (SEQ ID NO: 526) | GAACCCCAACGCCACCTTCG | |
| | | | GCGAGGTGAGCAAGATCGTG | |
| | | | GCCAGCATGTGGGACGGCCT | |
| | | | GGGCGAGGAGCAGAAGCAGG | |
| | | | TGTACAAGAAGAAGACCGAG | |
| | | | GCCGCCAAGAAGGAGTACCT | |
| | | | GAAGCAGCTGGCCGCCTACA | |
| | | | GAGCCAGCCTGGTGAGCAAG | |
| | | | (SEQ ID NO: 1158) | |
| ZN274 | PVTFQDVAVDFSREEWGLLG | QEEKQEDAAICPVTVLPEEP | CAGGAGGAGAAGCAGGAGGA | 4.82395142 |
| | PTQRTEYRDVMLETFGHLVS | VTFQDVAVDFSREEWGLLGP | CGCCGCCATCTGCCCCGTGA | |
| | V (SEQ ID NO: 527) | TQRTEYRDVMLETFGHLVSV | CCGTGCTGCCCGAGGAGCCT | |
| | | GWETTLENKELAPNSDIPEE | GTGACCTTCCAGGACGTGGC | |
| | | (SEQ ID NO: 528) | CGTGGACTTCAGCAGAGAGG | |
| | | | AGTGGGGCCTGCTGGGCCCC | |
| | | | ACCCAGAGAACCGAGTACAG | |
| | | | AGATGTGATGCTGGAGACCT | |
| | | | TCGGCCACCTGGTGAGCGTG | |
| | | | GGCTGGGAGACCACCCTGGA | |
| | | | GAACAAGGAGCTGGCCCCCA | |
| | | | ACAGCGACATCCCCGAGGAG | |
| | | | (SEQ ID NO: 1159) | |
| ZN75C | LLTFEDMAVYFSEEEWQLLG | KSTKDWKMAPKLIWPESQSL | AAGAGCACCAAGGACTGGAA | 4.81809368 |
| | PLEKTLYNDVMQDIYETAIS | LTFEDMAVYFSEEEWQLLGP | GATGGCCCCCAAGCTGATCT | |
| | L (SEQ ID NO: 529) | LEKTLYNDVMQDIYETAISL | GGCCCGAGAGCCAGAGCCTG | |
| | | GKQRTGKIMGIEMASSFSKE | CTGACCTTCGAGGACATGGC | |
| | | (SEQ ID NO: 530) | CGTGTACTTCAGCGAGGAGG | |
| | | | AGTGGCAGCTGCTGGGCCCC | |
| | | | CTGGAGAAGACCCTGTACAA | |
| | | | CGACGTGATGCAGGACATCT | |
| | | | ACGAGACCGCCATCAGCCTG | |
| | | | GGCAAGCAGAGAACCGGCAA | |
| | | | GATCATGGGCATCGAGATGG | |
| | | | CCAGCAGCTTCAGCAAGGAG | |
| | | | (SEQ ID NO: 1160) | |
| SCMH1 | SSWTVEDVMQFVREADPQLG | DASRLSGRDPSSWTVEDVMQ | GACGCCAGCAGACTGAGCGG | 4.79639316 |
| | PHADLFRKHEIDGKALLLLR | FVREADPQLGPHADLFRKHE | CAGAGACCCCAGCAGCTGGA | |
| | SDMMMKYMGLKLGPALKLSY | IDGKALLLLRSDMMMKYMGL | CCGTGGAGGACGTGATGCAG | |
| | HIDRL | KLGPALKLSYHIDRLKQGKF | TTCGTGAGAGAGGCCGACCC | |
| | (SEQ ID NO: 531) | (SEQ ID NO: 532) | CCAGCTGGGCCCCCACGCCG | |
| | | | ACCTGTTCAGAAAGCACGAG | |
| | | | ATCGACGGCAAGGCCCTGCT | |
| | | | GCTGCTGAGAAGCGACATGA | |
| | | | TGATGAAGTACATGGGCCTG | |
| | | | AAGCTGGGCCCCGCCCTGAA | |
| | | | GCTGAGCTACCACATCGACA | |
| | | | GACTGAAGCAGGGCAAGTTC | |
| | | | (SEQ ID NO: 1161) | |
| ZN560 | SVTFEDTAVDFTQEEWILLD | AYCLTNCYQYSVTFEDTAVD | GCCTACTGCCTGACCAACTG | 4.77465441 |
| | PVQRNLYRDVMLENYENVAK | FTQEEWILLDPVQRNLYRDV | CTACCAGTACAGCGTGACCT | |
| | V (SEQ ID NO: 533) | MLENYENVAKVGFQLFKPSV | TCGAGGACACCGCCGTGGAC | |
| | | ISWLEEEELRTLQQGVLQDW | TTCACCCAGGAGGAGTGGAT | |
| | | (SEQ ID NO: 534) | CCTGCTGGACCCCGTGCAGA | |
| | | | GAAACCTGTACAGAGATGTG | |
| | | | ATGCTGGAGAACTACGAGAA | |
| | | | CGTGGCCAAGGTGGGCTTCC | |
| | | | AGCTGTTCAAGCCCAGCGTG | |
| | | | ATCAGCTGGCTGGAGGAGGA | |
| | | | GGAGCTGAGAACCCTGCAGC | |
| | | | AGGGCGTGCTGCAGGACTGG | |
| | | | (SEQ ID NO: 1162) | |
| SCML4 | SAWTVEDVVWFVKDADPQAL | ARRPRSRNPSAWTVEDVVWF | GCCAGAAGACCCAGAAGCAG | 4.74079704 |
| | GPHVELFRKHEIDGNALLLL | VKDADPQALGPHVELFRKHE | AAACCCCAGCGCCTGGACCG | |
| | KSDMVMKYLGLKLGPALKLC | IDGNALLLLKSDMVMKYLGL | TGGAGGACGTGGTGTGGTTC | |
| | YHIDKL | KLGPALKLCYHIDKLKQAKF | GTGAAGGACGCCGACCCCCA | |
| | (SEQ ID NO: 535) | (SEQ ID NO: 536) | GGCCCTGGGCCCCCACGTGG | |
| | | | AGCTGTTCAGAAAGCACGAG | |
| | | | ATCGACGGCAACGCCCTGCT | |
| | | | GCTGCTGAAGAGCGACATGG | |
| | | | TGATGAAGTACCTGGGCCTG | |
| | | | AAGCTGGGCCCCGCCCTGAA | |
| | | | GCTGTGCTACCACATCGACA | |
| | | | AGCTGAAGCAGGCCAAGTTC | |
| | | | (SEQ ID NO: 1163) | |
| ZN214 | AVTFEDVTIIFTWEEWKFLD | AVTFEDVTIIFTWEEWKFLD | GCCGTGACCTTCGAGGACGT | 4.72989473 |
| | SSQKRLYREVMWENYTNVMS | SSQKRLYREVMWENYTNVMS | GACCATCATCTTCACCTGGG | |
| | V (SEQ ID NO: 537) | VENWNESYKSQEEKFRYLEY | AGGAGTGGAAGTTCCTGGAC | |
| | | ENFSYWQGWWNAGAQMYENQ | AGCAGCCAGAAGAGACTGTA | |
| | | (SEQ ID NO: 538) | CAGAGAGGTGATGTGGGAGA | |
| | | | ACTACACCAACGTGATGAGC | |
| | | | GTGGAGAACTGGAACGAGAG | |
| | | | CTACAAGAGCCAGGAGGAGA | |
| | | | AGTTCAGATACCTGGAGTAC | |
| | | | GAGAACTTCAGCTACTGGCA | |
| | | | GGGCTGGTGGAACGCCGGCG | |
| | | | CCCAGATGTACGAGAACCAG | |
| | | | (SEQ ID NO: 1164) | |
| CBX7 | FAVESIRKKRVRKGKVEYLV | ELSAIGEQVFAVESIRKKRV | GAGCTGAGCGCCATCGGCGA | 4.70199486 |
| | KWKGWPPKYSTWEPEEHILD | RKGKVEYLVKWKGWPPKYST | GCAGGTGTTCGCCGTGGAGA | |
| | PRLVMAYEE | WEPEEHILDPRLVMAYEEKE | GCATCAGAAAGAAGAGAGTG | |
| | (SEQ ID NO: 539) | ERDRASGYRKRGPKPKRLLL | AGAAAGGGCAAGGTGGAGTA | |
| | | (SEQ ID NO: 540) | CCTGGTGAAGTGGAAGGGCT | |
| | | | GGCCCCCCAAGTACAGCACC | |
| | | | TGGGAGCCCGAGGAGCACAT | |
| | | | CCTGGACCCCAGACTGGTGA | |
| | | | TGGCCTACGAGGAGAAGGAG | |
| | | | GAGAGAGACAGAGCCAGCGG | |
| | | | CTACAGAAAGAGAGGCCCCA | |
| | | | AGCCCAAGAGACTGCTGCTG | |
| | | | (SEQ ID NO: 1165) | |
| ID1 | LYDMNGCYSRLKELVPTLPQ | GGAGARLPALLDEQQVNVLL | GGCGGCGCCGGCGCCAGACT | 4.66128008 |
| | NRKVSKVEILQHVIDYIRDL | YDMNGCYSRLKELVPTLPQN | GCCCGCCCTGCTGGACGAGC | |
| | (SEQ ID NO: 541) | RKVSKVEILQHVIDYIRDLQ | AGCAGGTTAACGTGCTGCTG | |
| | | LELNSESEVGTPGGRGLPVR | TACGACATGAACGGCTGCTA | |
| | | (SEQ ID NO: 542) | CAGCAGACTGAAGGAGCTGG | |
| | | | TGCCCACCCTGCCCCAGAAC | |
| | | | AGAAAGGTGAGCAAGGTGGA | |
| | | | GATCCTGCAGCACGTGATCG | |
| | | | ACTACATCAGAGACCTGCAG | |
| | | | CTGGAGCTGAACAGCGAGAG | |
| | | | CGAGGTGGGCACCCCCGGCG | |
| | | | GCAGAGGCCTGCCTGTGAGA | |
| | | | (SEQ ID NO: 1166) | |
| CREM | AKECRRRKKEYVKCLESRVA | VVMAASPGSLHSPQQLAEEA | GTGGTGATGGCCGCCAGCCC | 4.58757659 |
| | VLEVQNKKLIEELETLKDIC | TRKRELRLMKNREAAKECRR | CGGCAGCCTGCACAGCCCCC | |
| | SPKTD | RKKEYVKCLESRVAVLEVQN | AGCAGCTTGCTGAGGAAGCC | |
| | (SEQ ID NO: 543) | KKLIEELETLKDICSPKTDY | ACCAGAAAGAGAGAGCTGAG | |
| | | (SEQ ID NO: 544) | ACTGATGAAGAACAGAGAGG | |
| | | | CCGCCAAGGAGTGCAGAAGA | |
| | | | AGAAAGAAGGAGTACGTGAA | |
| | | | GTGCCTGGAGAGCAGAGTGG | |
| | | | CCGTGCTGGAGGTGCAGAAC | |
| | | | AAGAAGCTGATCGAGGAGCT | |
| | | | GGAGACCCTGAAGGACATCT | |
| | | | GCAGCCCCAAGACCGACTAC | |
| | | | (SEQ ID NO: 1167) | |
| FER3L | QRQAANIRERKRMFNLNEAF | SLLGRPKRKRVITYAQRQAA | AGCCTGCTGGGCAGACCCAA | 4.55608825 |
| | DQLRRKVPTFAYEKRLSRIE | NIRERKRMFNLNEAFDQLRR | GAGAAAGAGAGTGATCACCT | |
| | TLRLAIVYISFM | KVPTFAYEKRLSRIETLRLA | ACGCCCAGAGACAGGCCGCC | |
| | (SEQ ID NO: 545) | IVYISFMTELLESCEKKESG | AACATCAGAGAGAGAAAGAG | |
| | | (SEQ ID NO: 546) | AATGTTCAACCTGAACGAGG | |
| | | | CCTTCGACCAGCTGAGAAGA | |
| | | | AAGGTGCCCACCTTCGCCTA | |
| | | | CGAGAAGAGACTGAGCAGAA | |
| | | | TCGAGACCCTGAGACTGGCC | |
| | | | ATCGTGTACATCAGCTTCAT | |
| | | | GACCGAGCTGCTGGAGAGCT | |
| | | | GCGAGAAGAAGGAGAGCGGC | |
| | | | (SEQ ID NO: 1168) | |
| SCX | QRHTANARERDRTNSVNTAF | GGGPGGRPGREPRQRHTANA | GGCGGCGGCCCCGGCGGCAG | 4.38664628 |
| | TALRTLIPTEPADRKLSKIE | RERDRTNSVNTAFTALRTLI | ACCCGGCAGAGAGCCCAGAC | |
| | TLRLASSYISHL | PTEPADRKLSKIETLRLASS | AAAGACACACCGCCAACGCC | |
| | (SEQ ID NO: 547) | YISHLGNVLLAGEACGDGQP | AGAGAGAGAGACAGAACCAA | |
| | | (SEQ ID NO: 548) | CAGCGTGAACACCGCCTTCA | |
| | | | CCGCCCTGAGAACCCTGATC | |
| | | | CCCACCGAGCCCGCCGACAG | |
| | | | AAAGCTGAGCAAGATCGAGA | |
| | | | CCCTGAGACTGGCCAGCAGC | |
| | | | TACATCAGCCACCTGGGCAA | |
| | | | CGTGCTGCTGGCCGGCGAGG | |
| | | | CCTGCGGCGATGGACAGCCC | |
| | | | (SEQ ID NO: 1169) | |
| ASCL1 | AVARRNERERNRVKLVNLGF | SGFGYSLPQQQPAAVARRNE | AGCGGCTTCGGCTACAGCCT | 4.23952129 |
| | ATLREHVPNGAANKKMSKVE | RERNRVKLVNLGFATLREHV | GCCCCAGCAGCAGCCCGCCG | |
| | TLRSAVEYIRAL | PNGAANKKMSKVETLRSAVE | CCGTGGCTAGAAGAAACGAG | |
| | (SEQ ID NO: 549) | YIRALQQLLDEHDAVSAAFQ | AGAGAGAGAAACAGAGTGAA | |
| | | (SEQ ID NO: 550) | GCTGGTGAACCTGGGCTTCG | |
| | | | CCACCCTGAGAGAGCACGTG | |
| | | | CCCAACGGCGCCGCCAACAA | |
| | | | GAAGATGAGCAAGGTGGAGA | |
| | | | CCCTGAGAAGCGCCGTGGAG | |
| | | | TACATCAGAGCCCTGCAGCA | |
| | | | GCTGCTGGACGAGCACGACG | |
| | | | CCGTGAGCGCCGCCTTCCAG | |
| | | | (SEQ ID NO: 1170) | |
| ZN764 | AVSFADVAVYFCREEWGCLR | APLPPRDPNGAGPEWREPGA | GCCCCCCTGCCCCCCAGAGA | 4.16413141 |
| | PAQRALYRDVMRETYGHLSA | VSFADVAVYFCREEWGCLRP | CCCCAACGGCGCCGGCCCTG | |
| | L (SEQ ID NO: 551) | AQRALYRDVMRETYGHLSAL | AATGGAGAGAGCCCGGAGCC | |
| | | GIGGNKPALISWVEEEAELW | GTGAGCTTCGCCGACGTGGC | |
| | | (SEQ ID NO: 552) | CGTGTACTTCTGCAGAGAGG | |
| | | | AGTGGGGCTGCCTGAGACCC | |
| | | | GCCCAGAGAGCCCTGTACAG | |
| | | | AGATGTGATGAGAGAGACCT | |
| | | | ACGGCCACCTGAGCGCCCTG | |
| | | | GGCATCGGCGGCAACAAGCC | |
| | | | CGCCCTGATCAGCTGGGTGG | |
| | | | AGGAGGAGGCCGAGCTGTGG | |
| | | | (SEQ ID NO: 1171) | |
| SCML2 | STWSVDEVIQFMKHTDPQIS | KQGFSKDPSTWSVDEVIQFM | AAGCAGGGCTTCAGCAAGGA | 4.16119992 |
| | GPLADLFRQHEIDGKALFLL | KHTDPQISGPLADLFRQHEI | CCCCAGCACCTGGAGCGTGG | |
| | KSDVMMKYMGLKLGPALKLC | DGKALFLLKSDVMMKYMGLK | ACGAGGTGATCCAGTTCATG | |
| | YYIEKL | LGPALKLCYYIEKLKEGKYS | AAGCACACCGACCCCCAGAT | |
| | (SEQ ID NO: 553) | (SEQ ID NO: 554) | CAGCGGCCCCCTGGCCGACC | |
| | | | TGTTCAGACAGCACGAGATC | |
| | | | GACGGCAAGGCCCTGTTCCT | |
| | | | GCTGAAGAGCGACGTGATGA | |
| | | | TGAAGTACATGGGCCTGAAG | |
| | | | CTGGGCCCCGCCCTGAAGCT | |
| | | | GTGCTACTACATCGAGAAGC | |
| | | | TGAAGGAGGGCAAGTACAGC | |
| | | | (SEQ ID NO: 1172) | |
| ASCL5 | IQKRNERERQRVKCVNEGYA | GAFGVYEYPFEPAFIQKRNE | GGCGCCTTCGGCGTGTACGA | 4.14708139 |
| | RLRGHLPGALAEKRLSKVET | RERQRVKCVNEGYARLRGHL | GTACCCCTTCGAGCCCGCCT | |
| | LRAAIRYIKYL | PGALAEKRLSKVETLRAAIR | TCATCCAGAAGAGAAACGAG | |
| | (SEQ ID NO: 555) | YIKYLQELLSSAPDGSTPPA | AGAGAGAGACAGAGAGTGAA | |
| | | (SEQ ID NO: 556) | GTGCGTGAACGAGGGCTACG | |
| | | | CCAGACTGAGAGGCCACCTG | |
| | | | CCCGGCGCCCTGGCCGAGAA | |
| | | | GAGACTGAGCAAGGTGGAGA | |
| | | | CCCTGAGAGCCGCCATCAGA | |
| | | | TACATCAAGTACCTGCAGGA | |
| | | | GCTGCTGAGCAGCGCCCCCG | |
| | | | ACGGCAGCACCCCCCCTGCT | |
| | | | (SEQ ID NO: 1173) | |
| TWST1 | QRVMANVRERQRTQSLNEAF | SGGGSPQSYEELQTQRVMAN | AGCGGCGGCGGCAGCCCCCA | 4.09571741 |
| | AALRKIIPTLPSDKLSKIQT | VRERQRTQSLNEAFAALRKI | GAGCTACGAGGAGCTGCAGA | |
| | LKLAARYIDFL | IPTLPSDKLSKIQTLKLAAR | CCCAGAGAGTGATGGCCAAC | |
| | (SEQ ID NO: 557) | YIDFLYQVLQSDELDSKMAS | GTGAGAGAGAGACAGAGAAC | |
| | | (SEQ ID NO: 558) | CCAGAGCCTGAACGAGGCCT | |
| | | | TCGCCGCCCTGAGAAAGATC | |
| | | | ATCCCCACCCTGCCCAGCGA | |
| | | | CAAGCTGAGCAAGATCCAGA | |
| | | | CCCTGAAGCTGGCCGCCAGA | |
| | | | TACATCGACTTCCTGTACCA | |
| | | | GGTGCTGCAGAGCGACGAGC | |
| | | | TGGACAGCAAGATGGCCAGC | |
| | | | (SEQ ID NO: 1174) | |
| ZN319 | DLQRHRRVHTGEKPYKCPNC | FVQHRCDPAREKPLKCPDCE | TTCGTGCAGCACAGATGCGA | 4.08013835 |
| | DKAFK | KRFKYASDLQRHRRVHTGEK | CCCCGCCAGAGAGAAGCCCC | |
| | (SEQ ID NO: 559) | PYKCPNCDKAFKQREHLNKH | TGAAGTGCCCCGACTGCGAG | |
| | | QGVHAREQQFKCVWCGERFL | AAGAGATTCAAGTACGCCAG | |
| | | (SEQ ID NO: 560) | CGACCTGCAGAGACACAGAA | |
| | | | GAGTGCACACCGGCGAGAAG | |
| | | | CCCTACAAGTGCCCCAACTG | |
| | | | CGACAAGGCCTTCAAGCAGA | |
| | | | GAGAGCACCTGAACAAGCAC | |
| | | | CAGGGCGTGCACGCCAGAGA | |
| | | | GCAGCAGTTCAAGTGCGTGT | |
| | | | GGTGCGGCGAGAGATTCCTG | |
| | | | (SEQ ID NO: 1175) | |
| ZN749 | CMVFEDVAIYFSQEEWGILN | NLTEDCMVFEDVAIYFSQEE | AACCTGACCGAGGACTGCAT | 4.06508464 |
| | DAQRHLHSNVMLENFALLSS | WGILNDAQRHLHSNVMLENF | GGTGTTCGAGGACGTGGCCA | |
| | V (SEQ ID NO: 561) | ALLSSVGCWHGAKDEEVPSK | TCTACTTCAGCCAGGAGGAG | |
| | | QCVSVRVLQVTIPKPALSTL | TGGGGCATCCTGAACGACGC | |
| | | (SEQ ID NO: 562) | CCAGAGACACCTGCACAGCA | |
| | | | ACGTGATGCTGGAGAACTTC | |
| | | | GCCCTGCTGAGCAGCGTGGG | |
| | | | CTGCTGGCACGGCGCCAAGG | |
| | | | ACGAGGAGGTGCCCAGCAAG | |
| | | | CAGTGCGTGAGCGTGAGAGT | |
| | | | GCTGCAGGTGACCATCCCCA | |
| | | | AGCCCGCCCTGAGCACCCTG | |
| | | | (SEQ ID NO: 1176) | |

TABLE 2
Pfam Activators

| | Pfam Domain | Extended Domain | Extended Domain | Avg |
|---|---|---|---|---|
| Gene | sequence | sequence | DNA sequence | Activation |
| ZN473 | FVTLKDVGMDFTLGDWEQLG | AEEFVTLKDVGMDFTLGDWE | GCCGAGGAGTTCGTGACCCT | −8.6232004 |
| | LEQGDTFWDTALDNCQDLFL | QLGLEQGDTFWDTALDNCQD | GAAGGACGTGGGCATGGACT | |
| | L | LFLLDPPRPNLTSHPDGSED | TCACCCTGGGCGACTGGGAG | |
| | (SEQ ID NO: 563) | LEPLAGGSPEATSPDVTETK | CAGCTGGGCCTGGAGCAGGG | |
| | | (SEQ ID NO: 564) | CGACACCTTCTGGGACACCG | |
| | | | CCCTGGACAACTGCCAGGAC | |
| | | | CTGTTCCTGCTGGACCCCCC | |
| | | | CAGACCCAACCTGACCAGCC | |
| | | | ACCCCGACGGCAGCGAGGAC | |
| | | | CTGGAGCCCCTGGCTGGAGG | |
| | | | AAGCCCTGAGGCCACCAGCC | |
| | | | CCGACGTGACCGAGACCAAG | |
| | | | (SEQ ID NO: 1178) | |
| FOXO3 | HEKFPSDLDLDMFNGSLECD | DSLSGSSLYSTSANLPVMGH | GACAGCCTGAGCGGCAGCAG | −8.3891724 |
| | MESIIRSELMDADGLDFNFD | EKFPSDLDLDMFNGSLECDM | CCTGTACAGCACCAGCGCCA | |
| | S | ESIIRSELMDADGLDFNFDS | ACCTGCCCGTGATGGGCCAC | |
| | (SEQ ID NO: 565) | LISTQNVVGLNVGNFTGAKQ | GAGAAGTTCCCCAGCGACCT | |
| | | (SEQ ID NO: 566) | GGACCTGGACATGTTCAACG | |
| | | | GCAGCCTGGAGTGCGACATG | |
| | | | GAGAGCATCATCAGAAGCGA | |
| | | | GCTGATGGACGCCGACGGCC | |
| | | | TGGACTTCAACTTCGACAGC | |
| | | | CTGATCAGCACCCAGAACGT | |
| | | | GGTGGGCCTGAACGTGGGCA | |
| | | | ACTTCACCGGCGCCAAGCAG | |
| | | | (SEQ ID NO: 1179) | |
| FOX01 | QEKLPSDLDGMFIERLDCDM | GGYSSVSSCNGYGRMGLLHQ | GGCGGCTACAGCAGCGTGAG | −8.3703632 |
| | ESIIRNDLMDGDTLDFNFDN | EKLPSDLDGMFIERLDCDME | CAGCTGCAACGGCTACGGCA | |
| | (SEQ ID NO: 567) | SIIRNDLMDGDTLDFNFDNV | GAATGGGCCTGCTGCACCAG | |
| | | LPNQSFPHSVKTTTHSWVSG | GAGAAGCTGCCCAGCGACCT | |
| | | (SEQ ID NO: 568) | GGACGGCATGTTCATCGAGA | |
| | | | GACTGGACTGCGACATGGAG | |
| | | | AGCATCATCAGAAACGACCT | |
| | | | GATGGACGGCGACACCCTGG | |
| | | | ACTTCAACTTCGACAACGTG | |
| | | | CTGCCCAACCAGAGCTTCCC | |
| | | | CCACAGCGTGAAGACCACCA | |
| | | | CCCACAGCTGGGTGAGCGGC | |
| | | | (SEQ ID NO: 1180) | |
| MYBA | GNCIEHVQPTSAFIQQPFID | FYIPVQIPGYQYVSPEGNCI | TTCTACATCCCCGTGCAGAT | −8.2096102 |
| | EDPDKEKKIKELEMLLMSAE | EHVQPTSAFIQQPFIDEDPD | CCCCGGCTACCAGTACGTGA | |
| | NEVRRK | KEKKIKELEMLLMSAENEVR | GCCCCGAGGGCAACTGCATC | |
| | (SEQ ID NO: 569) | RKRIPSQPGSFSSWSGSFLM | GAGCACGTGCAGCCCACCAG | |
| | | (SEQ ID NO: 570) | CGCCTTCATCCAGCAGCCCT | |
| | | | TCATCGACGAGGACCCCGAC | |
| | | | AAGGAGAAGAAGATCAAGGA | |
| | | | GCTGGAGATGCTGCTGATGA | |
| | | | GCGCCGAGAACGAGGTGAGA | |
| | | | AGAAAGAGAATCCCCAGCCA | |
| | | | GCCCGGCAGCTTCAGCAGCT | |
| | | | GGAGCGGCAGCTTCCTGATG | |
| | | | (SEQ ID NO: 1181) | |
| MYB | VNIVNVPQPAAAAIQRHYND | EAQNVSSHVPYPVALHVNIV | GAGGCCCAGAACGTGAGCAG | −7.2112528 |
| | EDPEKEKRIKELELLLMSTE | NVPQPAAAAIQRHYNDEDPE | CCACGTGCCCTACCCCGTGG | |
| | NELKGQ | KEKRIKELELLLMSTENELK | CCCTGCACGTGAACATCGTG | |
| | (SEQ ID NO: 571) | GQQVLPTQNHTCSYPGWHST | AACGTGCCCCAGCCCGCCGC | |
| | | (SEQ ID NO: 572) | CGCCGCCATCCAGAGACACT | |
| | | | ACAACGACGAGGACCCCGAG | |
| | | | AAGGAGAAGAGAATCAAGGA | |
| | | | GCTGGAGCTGCTGCTGATGA | |
| | | | GCACCGAGAACGAGCTGAAG | |
| | | | GGCCAGCAGGTGCTGCCCAC | |
| | | | CCAGAACCACACCTGCAGCT | |
| | | | ACCCCGGCTGGCACAGCACC | |
| | | | (SEQ ID NO: 1182) | |
| NCOA2 | ESPSDEGALLDQLYLALRNF | PFGSSPDDLLCPHPAAESPS | CCCTTCGGCAGCAGCCCCGA | −7.1119077 |
| | DGLEEIDRALGIPELVSQSQ | DEGALLDQLYLALRNFDGLE | CGACCTGCTGTGCCCCCACC | |
| | AVDPEQ | EIDRALGIPELVSQSQAVDP | CCGCTGCTGAAAGCCCCAGC | |
| | (SEQ ID NO: 573) | EQFSSQDSNIMLEQKAPVFP | GACGAGGGCGCTCTGCTGGA | |
| | | (SEQ ID NO: 574) | CCAGCTGTACCTGGCCCTGA | |
| | | | GAAACTTCGACGGCCTGGAG | |
| | | | GAGATCGACAGAGCCCTGGG | |
| | | | CATCCCCGAGCTGGTGAGCC | |
| | | | AGAGCCAGGCCGTGGACCCC | |
| | | | GAGCAGTTCAGCAGCCAGGA | |
| | | | CAGCAACATCATGCTGGAGC | |
| | | | AGAAGGCCCCCGTGTTCCCC | |
| | | | (SEQ ID NO: 1183) | |
| SMCA2 | PFSPVQLHQLRAQILAYKML | SQPGALIPGDPQAMSQPNRG | AGCCAGCCCGGCGCCCTGAT | −6.7916451 |
| | ARGQPLPETLQLAV | PSPFSPVQLHQLRAQILAYK | CCCCGGCGACCCCCAGGCTA | |
| | (SEQ ID NO: 575) | MLARGQPLPETLQLAVQGKR | TGAGCCAACCTAACAGAGGC | |
| | | TLPGL | CCCAGCCCCTTCAGCCCCGT | |
| | | (SEQ ID NO: 576) | GCAGCTGCACCAGCTGAGAG | |
| | | | CCCAGATCCTGGCCTACAAG | |
| | | | ATGCTGGCCAGAGGCCAGCC | |
| | | | CCTGCCCGAGACCCTGCAGC | |
| | | | TGGCCGTGCAAGGCAAGAGA | |
| | | | ACCCTGCCCGGCCTGCAGCA | |
| | | | GCAGCAGCAGCAGCAGCAGC | |
| | | | AGCAGCAGCAGCAGCAGCAG | |
| | | | (SEQ ID NO: 1184) | |
| KIBRA | LPEGWEEARDFDGKVYYIDH | PRPELPLPEGWEEARDFDGK | CCCAGACCCGAGCTGCCCCT | −6.707792 |
| | TNRTTSWID | VYYIDHTNRTTSWIDPRDRY | GCCCGAGGGCTGGGAGGAGG | |
| | (SEQ ID NO: 577) | TKPLTFADCISDELPLGWEE | CCAGAGACTTCGACGGCAAG | |
| | | AYDPQVGDYFIDHNTKTTQI | GTGTACTACATCGACCACAC | |
| | | (SEQ ID NO: 578) | CAACAGAACCACCAGCTGGA | |
| | | | TCGACCCCAGAGACAGATAC | |
| | | | ACCAAGCCCCTGACCTTCGC | |
| | | | CGACTGCATCAGCGACGAGC | |
| | | | TGCCCCTGGGCTGGGAGGAG | |
| | | | GCCTACGACCCCCAGGTGGG | |
| | | | AGACTACTTCATCGACCACA | |
| | | | ACACCAAGACCACCCAGATC | |
| | | | (SEQ ID NO: 1185) | |
| NCOA3 | EGQSDERALLDQLHTLLSNT | LRNSLDDLVGPPSNLEGQSD | CTGAGAAACAGCCTGGACGA | −6.4149356 |
| | DATGLEEIDRALGIPELVNQ | ERALLDQLHTLLSNTDATGL | CCTGGTGGGCCCCCCCAGCA | |
| | GQALEPKQ | EEIDRALGIPELVNQGQALE | ACCTGGAGGGCCAGAGCGAC | |
| | (SEQ ID NO: 579) | PKQDAFQGQEAAVMMDQKAG | GAGAGAGCCCTGCTGGACCA | |
| | | (SEQ ID NO: 580) | GCTGCACACCCTGCTGAGCA | |
| | | | ACACCGACGCCACCGGCCTG | |
| | | | GAGGAGATCGACAGAGCCCT | |
| | | | GGGCATCCCCGAGCTGGTGA | |
| | | | ACCAGGGCCAGGCCCTGGAG | |
| | | | CCCAAGCAGGACGCCTTCCA | |
| | | | GGGCCAGGAGGCTGCCGTGA | |
| | | | TGATGGACCAGAAGGCCGGC | |
| | | | (SEQ ID NO: 1186) | |
| FOX06 | PDRFPADLDLDMFSGSLECD | LDALPGPYAAAAAGPLGAAP | CTGGACGCCCTGCCCGGCCC | −6.0518896 |
| | VESIILNDFMDSDEMDFNFD | DRFPADLDLDMFSGSLECDV | CTACGCCGCTGCTGCTGCTG | |
| | S | ESIILNDFMDSDEMDENFDS | GACCTCTTGGAGCTGCCCCT | |
| | (SEQ ID NO: 581) | ALPPPPPGLAGAPPPNQSWV | GACAGATTCCCCGCCGACCT | |
| | | (SEQ ID NO: 582) | GGACCTGGACATGTTCAGCG | |
| | | | GCAGCCTGGAGTGCGACGTG | |
| | | | GAGAGCATCATCCTGAACGA | |
| | | | CTTCATGGACAGCGACGAGA | |
| | | | TGGACTTCAACTTCGACAGC | |
| | | | GCCCTGCCCCCCCCCCCTCC | |
| | | | TGGACTTGCTGGAGCTCCTC | |
| | | | CTCCCAACCAGAGCTGGGTG | |
| | | | (SEQ ID NO: 1187) | |
| ZN597 | PILFEDLAVYFSQEECVTLH | ASMPPTPEAQGPILFEDLAV | GCCAGCATGCCCCCCACCCC | −5.9555177 |
| | PAQRSLSKDGTKESLEDAAL | YFSQEECVTLHPAQRSLSKD | CGAGGCCCAGGGCCCCATCC | |
| | M | GTKESLEDAALMGEEGKPEI | TGTTCGAGGACCTTGCTGTG | |
| | (SEQ ID NO: 583) | NQQLSLESMELDELALEKYP | TACTTCAGCCAGGAGGAGTG | |
| | | (SEQ ID NO: 584) | CGTGACCCTGCACCCCGCCC | |
| | | | AGAGAAGCCTGAGCAAGGAC | |
| | | | GGCACCAAGGAGAGCCTGGA | |
| | | | GGACGCCGCCCTGATGGGCG | |
| | | | AGGAGGGCAAGCCCGAGATC | |
| | | | AACCAGCAGCTGAGCCTGGA | |
| | | | GAGCATGGAGCTGGACGAGC | |
| | | | TGGCCCTGGAGAAGTACCCC | |
| | | | (SEQ ID NO: 1188) | |
| APBB1 | LPAGWMRVQDTSGTYYWHIP | GSPSYGSPEDTDSFWNPNAF | GGCAGCCCCAGCTACGGCAG | −5.8338079 |
| | TGTTQWEP | ETDSDLPAGWMRVQDTSGTY | CCCCGAGGACACCGACAGCT | |
| | (SEQ ID NO: 585) | YWHIPTGTTQWEPPGRASPS | TCTGGAACCCCAACGCCTTC | |
| | | QGSSPQEESQLTWTGFAHGE | GAGACCGACAGCGACCTGCC | |
| | | (SEQ ID NO: 586) | CGCCGGCTGGATGAGAGTGC | |
| | | | AGGACACCAGCGGCACCTAC | |
| | | | TACTGGCACATCCCCACCGG | |
| | | | CACCACCCAGTGGGAGCCCC | |
| | | | CCGGAAGAGCTAGCCCTAGC | |
| | | | CAGGGCAGCAGCCCCCAGGA | |
| | | | GGAGAGCCAGCTGACCTGGA | |
| | | | CCGGCTTCGCCCACGGCGAG | |
| | | | (SEQ ID NO: 1189) | |
| ANM2 | VAIADYAATDETQLSFLRGE | ECSEAGLLQEGVQPEEFVAI | GAGTGCAGCGAGGCCGGCCT | −5.6456716 |
| | KILILRQTTADWWWGERAGC | ADYAATDETQLSFLRGEKIL | GCTGCAGGAGGGCGTGCAGC | |
| | CGYIP | ILRQTTADWWWGERAGCCGY | CCGAGGAGTTCGTGGCTATC | |
| | (SEQ ID NO: 587) | IPANHVGKHVDEYDPEDTWQ | GCCGACTACGCCGCCACCGA | |
| | | (SEQ ID NO: 588) | CGAGACCCAGCTGAGCTTCC | |
| | | | TGAGAGGCGAGAAGATCCTG | |
| | | | ATCCTGAGACAGACCACCGC | |
| | | | CGACTGGTGGTGGGGCGAGA | |
| | | | GAGCCGGCTGCTGCGGCTAC | |
| | | | ATCCCCGCCAACCACGTGGG | |
| | | | CAAGCACGTGGACGAGTACG | |
| | | | ACCCCGAGGACACCTGGCAG | |
| | | | (SEQ ID NO: 1190) | |
| MED9 | SFLPLVHNIIKCMDKDSPEV | NYSFLPLVHNIIKCMDKDSP | AACTACAGCTTCCTGCCCCT | −5.5377024 |
| | HQDLNALKSKFQEMRKLIST | EVHQDLNALKSKFQEMRKLI | GGTGCACAACATCATCAAGT | |
| | MPGIHLSPEQQQQQLQSLRE | STMPGIHLSPEQQQQQLQSL | GCATGGACAAGGACAGCCCC | |
| | QVRTKNELLQKYKSL | REQVRTKNELLQKYKSLCMF | GAGGTGCACCAGGACCTGAA | |
| | (SEQ ID NO: 589) | (SEQ ID NO: 590) | CGCCCTGAAGAGCAAGTTCC | |
| | | | AGGAGATGAGAAAGCTGATC | |
| | | | AGCACCATGCCCGGCATCCA | |
| | | | CCTGAGCCCCGAGCAGCAGC | |
| | | | AGCAGCAGCTGCAGAGCCTG | |
| | | | AGAGAGCAGGTGAGAACCAA | |
| | | | GAACGAGCTGCTGCAGAAGT | |
| | | | ACAAGAGCCTGTGCATGTTC | |
| | | | (SEQ ID NO: 1191) | |
| CXXC1 | YCICRKPDINCFMIGCDNCN | AGEDSKSENGENAPIYCICR | GCCGGCGAGGACAGCAAGAG | −5.4566266 |
| | EWFHGDCIRITEKMAKAIRE | KPDINCFMIGCDNCNEWFHG | CGAGAACGGCGAGAACGCCC | |
| | WYCRECRE | DCIRITEKMAKAIREWYCRE | CCATCTACTGCATCTGCAGA | |
| | (SEQ ID NO: 591) | CREKDPKLEIRYRHKKSRER | AAGCCCGACATCAACTGCTT | |
| | | (SEQ ID NO: 592) | CATGATCGGCTGCGACAACT | |
| | | | GCAACGAGTGGTTCCACGGC | |
| | | | GACTGCATCAGAATCACCGA | |
| | | | GAAGATGGCCAAGGCCATCA | |
| | | | GAGAGTGGTACTGCAGAGAG | |
| | | | TGCAGAGAGAAGGACCCCAA | |
| | | | GCTGGAGATCAGATACAGAC | |
| | | | ACAAGAAGAGCAGAGAGAGA | |
| | | | (SEQ ID NO: 1192) | |
| CRTC2 | PNIILTGDSSPGFSKEIAAA | GPNIILTGDSSPGFSKEIAA | GGCCCCAACATCATCCTGAC | −5.293256 |
| | LAGVPGFEVSAAGLELGLGL | ALAGVPGFEVSAAGLELGLG | CGGCGACAGCAGCCCCGGCT | |
| | EDELRMEPLGLEGLNMLSDP | LEDELRMEPLGLEGLNMLSD | TCAGCAAGGAGATCGCCGCC | |
| | CALLPDPAVEESFRSDR | PCALLPDPAVEESFRSDRLQ | GCCCTGGCTGGCGTGCCTGG | |
| | (SEQ ID NO: 593) | (SEQ ID NO: 594) | ATTCGAGGTGAGCGCTGCTG | |
| | | | GACTGGAGCTGGGCCTGGGC | |
| | | | CTGGAGGACGAGCTGAGAAT | |
| | | | GGAGCCCCTGGGCCTGGAGG | |
| | | | GCCTGAACATGCTGAGCGAC | |
| | | | CCCTGCGCCCTGCTGCCCGA | |
| | | | CCCCGCTGTGGAGGAGAGCT | |
| | | | TCAGAAGCGACAGACTGCAG | |
| | | | (SEQ ID NO: 1193) | |
| NOTC2 | WANCSSPLPCWDYINNQCDE | EACNSHACQWDGGDCSLTME | GAGGCCTGCAACAGCCACGC | −5.2584004 |
| | LCNTVECLFDNFEC | NPWANCSSPLPCWDYINNQC | CTGCCAGTGGGACGGCGGCG | |
| | (SEQ ID NO: 595) | DELCNTVECLFDNFECQGNS | ACTGCAGCCTGACCATGGAG | |
| | | KTCKYDKYCADHFKDNHCDQ | AACCCCTGGGCCAACTGCAG | |
| | | (SEQ ID NO: 596) | CAGCCCCCTGCCCTGCTGGG | |
| | | | ACTACATCAACAACCAGTGC | |
| | | | GACGAGCTGTGCAACACCGT | |
| | | | GGAGTGCCTGTTCGACAACT | |
| | | | TCGAGTGCCAGGGCAACAGC | |
| | | | AAGACCTGCAAGTACGACAA | |
| | | | GTACTGCGCCGACCACTTCA | |
| | | | AGGACAACCACTGCGACCAG | |
| | | | (SEQ ID NO: 1194) | |
| CACO1 | KECPICKERFPAESDKDALE | SGGEEANLLLPELGSAFYDM | AGCGGCGGCGAGGAGGCCAA | −4.6832738 |
| | DHMDGH | ASGFTVGTLSETSTGGPATP | CCTGCTGCTGCCCGAGCTGG | |
| | (SEQ ID NO: 597) | TWKECPICKERFPAESDKDA | GCAGCGCTTTCTACGACATG | |
| | | LEDHMDGHFFFSTQDPFTFE | GCCAGCGGCTTCACCGTGGG | |
| | | (SEQ ID NO: 598) | CACCCTGAGCGAGACCAGCA | |
| | | | CCGGCGGACCCGCTACCCCC | |
| | | | ACATGGAAGGAGTGCCCCAT | |
| | | | CTGCAAGGAGAGATTCCCCG | |
| | | | CCGAGAGCGACAAGGACGCC | |
| | | | CTGGAGGACCACATGGACGG | |
| | | | CCACTTCTTCTTCAGCACCC | |
| | | | AGGACCCCTTCACCTTCGAG | |
| | | | (SEQ ID NO: 1195) | |
| PYGO1 | PCGICTNEVNDDQDAILCEA | RHGHSSSDPVYPCGICTNEV | AGACACGGCCACAGCAGCAG | −4.3430928 |
| | SCQKWFHRICTGMTETAYGL | NDDQDAILCEASCQKWFHRI | CGACCCCGTGTACCCCTGCG | |
| | LTAEASAVWGCDTCMA | CTGMTETAYGLLTAEASAVW | GCATCTGCACCAACGAGGTG | |
| | (SEQ ID NO: 599) | GCDTCMADKDVQLMRTRETF | AACGACGACCAGGACGCCAT | |
| | | (SEQ ID NO: 600) | CCTGTGCGAGGCCAGCTGCC | |
| | | | AGAAGTGGTTCCACAGAATC | |
| | | | TGCACCGGCATGACCGAGAC | |
| | | | CGCCTACGGCCTGCTGACCG | |
| | | | CCGAGGCCAGCGCTGTGTGG | |
| | | | GGATGCGACACCTGCATGGC | |
| | | | CGACAAGGACGTGCAGCTGA | |
| | | | TGAGAACCAGAGAGACCTTC | |
| | | | (SEQ ID NO: 1196) | |
| IKKA | AQMIEENLNCLGHLSTIIHE | LVGSSLEGAVTPQTSAWLPP | CTGGTGGGCAGCAGCCTGGA | −4.3328612 |
| | ANEEQGNSMMNLDWSW | TSAEHDHSLSCVVTPQDGET | GGGCGCCGTGACCCCCCAGA | |
| | (SEQ ID NO: 601) | SAQMIEENLNCLGHLSTIIH | CAAGCGCTTGGCTGCCCCCT | |
| | | EANEEQGNSMMNLDWSWLTE | ACCAGCGCTGAGCACGACCA | |
| | | (SEQ ID NO: 602) | CAGCCTGAGCTGCGTGGTGA | |
| | | | CCCCCCAGGACGGCGAGACC | |
| | | | AGCGCCCAGATGATCGAGGA | |
| | | | GAACCTGAACTGCCTGGGCC | |
| | | | ACCTGAGCACCATCATCCAC | |
| | | | GAGGCCAACGAGGAGCAGGG | |
| | | | CAACAGCATGATGAACCTGG | |
| | | | ACTGGAGCTGGCTGACCGAG | |
| | | | (SEQ ID NO: 1197) | |
| APC16 | DLAPPRKALFTYPKGAGEML | DLAPPRKALFTYPKGAGEML | GACCTGGCCCCCCCCAGAAA | −4.1227423 |
| | EDGSERFLCESVFSYQVAST | EDGSERFLCESVFSYQVAST | GGCCCTGTTCACCTACCCCA | |
| | LKQVKHDQQVARMEKLAGLV | LKQVKHDQQVARMEKLAGLV | AGGGCGCCGGCGAGATGCTG | |
| | EELEADEWRFKPIEQLLGF | EELEADEWRFKPIEQLLGFT | GAGGACGGCAGCGAGAGATT | |
| | (SEQ ID NO: 603) | (SEQ ID NO: 604) | CCTGTGCGAGAGCGTGTTCA | |
| | | | GCTACCAGGTGGCCAGCACC | |
| | | | CTGAAGCAGGTGAAGCACGA | |
| | | | CCAGCAGGTGGCCAGAATGG | |
| | | | AGAAGCTGGCCGGCCTGGTG | |
| | | | GAGGAGCTGGAGGCCGACGA | |
| | | | GTGGAGATTCAAGCCCATCG | |
| | | | AGCAGCTGCTGGGCTTCACC | |
| | | | (SEQ ID NO: 1198) | |
| WWP2 | LPPGWEKRQDNGRVYYVNHN | AMQHFSQRFLYQSSSASTDH | GCCATGCAGCACTTCAGCCA | −4.0489585 |
| | TRTTQWED | DPLGPLPPGWEKRQDNGRVY | GAGATTCCTGTACCAGAGCA | |
| | (SEQ ID NO: 605) | YVNHNTRTTQWEDPRTQGMI | GCAGCGCCAGCACCGACCAC | |
| | | QEPALPPGWEMKYTSEGVRY | GACCCCCTGGGCCCCCTTCC | |
| | | (SEQ ID NO: 606) | TCCTGGATGGGAGAAGAGAC | |
| | | | AGGACAACGGCAGAGTGTAC | |
| | | | TACGTGAACCACAACACCAG | |
| | | | AACCACCCAGTGGGAGGACC | |
| | | | CCAGAACCCAGGGCATGATC | |
| | | | CAGGAGCCCGCCCTGCCCCC | |
| | | | CGGATGGGAGATGAAGTACA | |
| | | | CCAGCGAGGGCGTGAGATAC | |
| | | | (SEQ ID NO: 1199) | |
| RIP | FLVQEVMEEEWNALQSVENC | NSQNSFLVQEVMEEEWNALQ | AACAGCCAGAACAGCTTCCT | −3.97129 |
| | PEDLAQLEELIDMAVLEEIQ | SVENCPEDLAQLEELIDMAV | GGTGCAGGAGGTGATGGAGG | |
| | QELINQEQSIISEYEKSLQF | LEEIQQELINQEQSIISEYE | AGGAGTGGAACGCCCTGCAG | |
| | DEKCLSIM | KSLQFDEKCLSIMLAEWEAN | AGCGTGGAGAACTGCCCCGA | |
| | (SEQ ID NO: 607) | (SEQ ID NO: 608) | GGACCTGGCCCAGCTGGAGG | |
| | | | AGCTGATCGACATGGCCGTG | |
| | | | CTGGAGGAGATCCAGCAGGA | |
| | | | GCTGATCAACCAGGAGCAGA | |
| | | | GCATCATCAGCGAGTACGAG | |
| | | | AAGAGCCTGCAGTTCGACGA | |
| | | | GAAGTGCCTGAGCATCATGC | |
| | | | TGGCCGAGTGGGAGGCCAAC | |
| | | | (SEQ ID NO: 1200) | |
| AF9 | AYLDELVELHRRLMTLRERH | KSDKQIKNGECDKAYLDELV | AAGAGCGACAAGCAGATCAA | −3.7419986 |
| | ILQQIVNLIEETGHFHITNT | ELHRRLMTLRERHILQQIVN | GAACGGCGAGTGCGACAAGG | |
| | TFDFDLCSLDKTTVRKLQSY | LIEETGHFHITNTTFDFDLC | CCTACCTGGACGAGCTGGTG | |
| | L | SLDKTTVRKLQSYLETSGTS | GAGCTGCACAGAAGACTGAT | |
| | (SEQ ID NO: 609) | (SEQ ID NO: 610) | GACCCTGAGAGAGAGACACA | |
| | | | TCCTGCAGCAGATCGTGAAC | |
| | | | CTGATCGAGGAGACCGGCCA | |
| | | | CTTCCACATCACCAACACCA | |
| | | | CCTTCGACTTCGACCTGTGC | |
| | | | AGCCTGGACAAGACCACCGT | |
| | | | GAGAAAGCTGCAGAGCTACC | |
| | | | TGGAGACCAGCGGCACCAGC | |
| | | | (SEQ ID NO: 1201) | |
| ZFP28 | LVTIKNLAVDFRQQLHPAQK | LEYSLLGEHWDYDALFETQP | CTGGAGTACAGCCTGCTGGG | −3.7291024 |
| | NFCKNGIWENNSDLGSA | GLVTIKNLAVDFRQQLHPAQ | CGAGCACTGGGACTACGACG | |
| | (SEQ ID NO: 610) | KNFCKNGIWENNSDLGSAGH | CCCTGTTCGAGACCCAGCCC | |
| | | CVAKPDLVSLLEQEKEPWMV | GGCCTGGTGACCATCAAGAA | |
| | | (SEQ ID NO: 612) | CCTGGCCGTGGACTTCAGAC | |
| | | | AGCAGCTGCACCCCGCCCAG | |
| | | | AAGAACTTCTGCAAGAACGG | |
| | | | CATCTGGGAGAACAACAGCG | |
| | | | ACCTGGGCAGCGCCGGCCAC | |
| | | | TGCGTGGCCAAGCCCGACCT | |
| | | | GGTTAGCCTGCTGGAGCAGG | |
| | | | AGAAGGAGCCCTGGATGGTG | |
| | | | (SEQ ID NO: 1202) | |
| WWP1 | LPPGWEKRVDSTDRVYFVNH | AMQQFNQRYLYSASMLAAEN | GCCATGCAGCAGTTCAACCA | −3.728405 |
| | NTKTTQWED | DPYGPLPPGWEKRVDSTDRV | GAGATACCTGTACAGCGCCA | |
| | (SEQ ID NO: 613) | YFVNHNTKTTQWEDPRTQGL | GCATGCTGGCCGCCGAGAAC | |
| | | QNEEPLPEGWEIRYTREGVR | GACCCCTACGGCCCCCTGCC | |
| | | (SEQ ID NO: 614) | TCCTGGCTGGGAGAAGAGAG | |
| | | | TGGACAGCACCGACAGAGTG | |
| | | | TACTTCGTGAACCACAACAC | |
| | | | CAAGACCACCCAGTGGGAGG | |
| | | | ACCCCAGAACCCAGGGCCTG | |
| | | | CAGAACGAGGAGCCCCTGCC | |
| | | | CGAGGGCTGGGAGATCAGAT | |
| | | | ACACCAGAGAGGGCGTGAGA | |
| | | | (SEQ ID NO: 1203) | |
| DPY30 | PTRAYLDQTVVPILLQGLAV | EYGLTDNVERIVENEKINAE | GAGTACGGCCTGACCGACAA | −3.696281 |
| | LAKERPPNPIEFLASYLLKN | KSSKQKVDLQSLPTRAYLDQ | CGTGGAGAGAATCGTGGAGA | |
| | K | TVVPILLQGLAVLAKERPPN | ACGAGAAGATCAACGCCGAG | |
| | (SEQ ID NO: 615) | PIEFLASYLLKNKAQFEDRN | AAGAGCAGCAAGCAGAAGGT | |
| | | (SEQ ID NO: 616) | GGACCTGCAGAGCCTGCCCA | |
| | | | CCAGAGCCTACCTGGACCAG | |
| | | | ACCGTGGTGCCCATCCTGCT | |
| | | | GCAGGGCCTGGCCGTGCTGG | |
| | | | CCAAGGAGAGACCCCCCAAC | |
| | | | CCCATCGAGTTCCTGGCCAG | |
| | | | CTACCTGCTGAAGAACAAGG | |
| | | | CCCAGTTCGAGGACAGAAAC | |
| | | | (SEQ ID NO: 1204) | |
| KS6B2 | LQSEEDVSQFDTRFTRQTPV | HMNWDDLLAWRVDPPFRPCL | CACATGAACTGGGACGACCT | −3.4939583 |
| | DSPDDTALSESANQAFLGFT | QSEEDVSQFDTRFTRQTPVD | GCTGGCCTGGAGAGTGGACC | |
| | (SEQ ID NO: 617) | SPDDTALSESANQAFLGFTY | CCCCCTTCAGACCCTGCCTG | |
| | | VAPSVLDSIKEGFSFQPKLR | CAGAGCGAGGAGGACGTGAG | |
| | | (SEQ ID NO: 618) | CCAGTTCGACACCAGATTCA | |
| | | | CCAGACAGACCCCCGTGGAC | |
| | | | AGCCCCGACGACACCGCCCT | |
| | | | GAGCGAGAGCGCCAACCAGG | |
| | | | CCTTCCTGGGCTTCACCTAC | |
| | | | GTGGCCCCCAGCGTGCTGGA | |
| | | | CAGCATCAAGGAGGGCTTCA | |
| | | | GCTTCCAGCCCAAGCTGAGA | |
| | | | (SEQ ID NO: 1205) | |
| PYGO2 | PCGACRSEVNDDQDAILCEA | SGPQPPPGLVYPCGACRSEV | AGCGGCCCCCAGCCCCCCCC | −3.4423787 |
| | SCQKWFHRECTGMTESAYGL | NDDQDAILCEASCQKWFHRE | CGGCCTGGTTTACCCTTGCG | |
| | LTTEASAVWACDLCLK | CTGMTESAYGLLTTEASAVW | GAGCTTGCAGAAGCGAGGTG | |
| | (SEQ ID NO: 619) | ACDLCLKTKEIQSVYIREGM | AACGACGACCAGGACGCCAT | |
| | | (SEQ ID NO: 620) | CCTGTGCGAGGCCAGCTGCC | |
| | | | AGAAGTGGTTCCACAGAGAG | |
| | | | TGCACCGGCATGACCGAGAG | |
| | | | CGCCTACGGCCTGCTGACCA | |
| | | | CCGAGGCCAGCGCCGTGTGG | |
| | | | GCTTGCGACCTGTGCCTGAA | |
| | | | GACCAAGGAGATCCAGAGCG | |
| | | | TGTACATCAGAGAGGGCATG | |
| | | | (SEQ ID NO: 1206) | |
| U2AF4 | FEEVFTELQEKYGEIEEMNV | VEVQEHYDSFFEEVFTELQE | GTGGAGGTGCAGGAGCACTA | −3.3553928 |
| | CDNLGDHLVGNVYVKFRREE | KYGEIEEMNVCDNLGDHLVG | CGACAGCTTCTTCGAGGAGG | |
| | DGERAVAELSNRWFNGQAV | NVYVKFRREEDGERAVAELS | TGTTCACCGAGCTGCAGGAG | |
| | (SEQ ID NO: 621) | NRWFNGQAVHGELSPVTDFR | AAGTACGGCGAGATCGAGGA | |
| | | (SEQ ID NO: 622) | GATGAACGTGTGCGACAACC | |
| | | | TGGGCGACCACCTGGTGGGC | |
| | | | AACGTGTACGTGAAGTTCAG | |
| | | | AAGAGAGGAGGACGGCGAGA | |
| | | | GAGCCGTGGCCGAGCTGAGC | |
| | | | AACAGATGGTTCAACGGCCA | |
| | | | GGCCGTGCACGGCGAGCTGA | |
| | | | GCCCCGTGACCGACTTCAGA | |
| | | | (SEQ ID NO: 1207) | |
| ITCH | LPPGWEQRVDQHGRVYYVDH | SGLIIPLTISGGSGPRPLNP | AGCGGCCTGATCATCCCCCT | −3.3366968 |
| | VEKRTTWDR | VTQAPLPPGWEQRVDQHGRV | GACCATCAGCGGCGGCAGCG | |
| | (SEQ ID NO: 623) | YYVDHVEKRTTWDRPEPLPP | GCCCCAGACCCCTGAACCCC | |
| | | GWERRVDNMGRIYYVDHFTR | GTGACCCAAGCTCCTCTGCC | |
| | | (SEQ ID NO: 624) | CCCCGGATGGGAGCAGAGAG | |
| | | | TGGACCAGCACGGCAGAGTG | |
| | | | TACTACGTGGACCACGTGGA | |
| | | | GAAGAGAACCACCTGGGACA | |
| | | | GACCCGAGCCCCTGCCCCCC | |
| | | | GGCTGGGAGAGAAGAGTGGA | |
| | | | CAACATGGGCAGAATCTACT | |
| | | | ACGTGGACCACTTCACCAGA | |
| | | | (SEQ ID NO: 1208) | |
| ENL | AYTDELVELHRRLMALRERN | SKPEKILKKGTYDKAYTDEL | AGCAAGCCCGAGAAGATCCT | −3.3117985 |
| | VLQQIVNLIEETGHFNVTNT | VELHRRLMALRERNVLQQIV | GAAGAAGGGCACCTACGACA | |
| | TFDFDLFSLDETTVRKLQSC | NLIEETGHFNVTNTTFDFDL | AGGCCTACACCGACGAGCTG | |
| | L | FSLDETTVRKLQSCLEAVAT | GTGGAGCTGCACAGAAGACT | |
| | (SEQ ID NO: 625) | (SEQ ID NO: 626) | GATGGCCCTGAGAGAGAGAA | |
| | | | ACGTGCTGCAGCAGATCGTG | |
| | | | AACCTGATCGAGGAGACCGG | |
| | | | CCACTTCAACGTGACCAACA | |
| | | | CCACCTTCGACTTCGACCTG | |
| | | | TTCAGCCTGGACGAGACCAC | |
| | | | CGTGAGAAAGCTGCAGAGCT | |
| | | | GCCTGGAGGCCGTGGCCACC | |
| | | | (SEQ ID NO: 1209) | |
| STAT2 | SQPVPEPDLPCDLRHLNTEP | SQTVPEPDQGPVSQPVPEPD | AGCCAGACCGTGCCCGAGCC | −3.1207026 |
| | MEIFRNCVKIEEIMPNGDPL | LPCDLRHLNTEPMEIFRNCV | CGACCAGGGCCCCGTGAGCC | |
| | LAGQNTVDEVYVSRP | KIEEIMPNGDPLLAGQNTVD | AGCCTGTTCCTGAGCCTGAC | |
| | (SEQ ID NO: 627) | EVYVSRPSHFYTDGPLMPSD | CTGCCCTGCGACCTGAGACA | |
| | | (SEQ ID NO: 628) | CCTGAACACCGAGCCCATGG | |
| | | | AGATCTTCAGAAACTGCGTG | |
| | | | AAGATCGAGGAGATCATGCC | |
| | | | CAACGGCGACCCCCTGCTGG | |
| | | | CCGGCCAGAACACCGTGGAC | |
| | | | GAGGTGTACGTGAGCAGACC | |
| | | | CAGCCACTTCTACACCGACG | |
| | | | GCCCCCTGATGCCCAGCGAC | |
| | | | (SEQ ID NO: 1210) | |
| NOTC1 | EEACELPECQEDAGNKVCSL | LCHILDYSFGGGAGRDIPPP | CTGTGCCACATCCTGGACTA | −3.1201108 |
| | QCNNHACGWDGGDC | LIEEACELPECQEDAGNKVC | CAGCTTCGGCGGCGGCGCCG | |
| | (SEQ ID NO: 629) | SLQCNNHACGWDGGDCSLNF | GCAGAGACATCCCCCCCCCT | |
| | | NDPWKNCTQSLQCWKYFSDG | CTGATCGAGGAGGCTTGCGA | |
| | | (SEQ ID NO: 630) | GCTGCCCGAGTGCCAGGAGG | |
| | | | ACGCCGGCAACAAGGTGTGC | |
| | | | AGCCTGCAGTGCAACAACCA | |
| | | | CGCCTGCGGCTGGGACGGCG | |
| | | | GCGACTGCAGCCTGAACTTC | |
| | | | AACGACCCCTGGAAGAACTG | |
| | | | CACCCAGAGCCTGCAGTGCT | |
| | | | GGAAGTACTTCAGCGACGGC | |
| | | | (SEQ ID NO: 1211) | |
| CRTC3 | PNTILPEDSSTSLFKDLNSA | NCGSLPNTILPEDSSTSLFK | AACTGCGGCAGCCTGCCCAA | −3.0736492 |
| | LAGLPEVSLNVDTPFPLEEE | DLNSALAGLPEVSLNVDTPF | CACCATCCTGCCCGAGGACA | |
| | LQIEPLSLDGLNMLSDSSMG | PLEEELQIEPLSLDGLNMLS | GCAGCACCAGCCTGTTCAAG | |
| | LLDPSVEETFRADR | DSSMGLLDPSVEETFRADRL | GACCTGAACAGCGCCCTGGC | |
| | (SEQ ID NO: 631) | (SEQ ID NO: 632) | CGGCCTGCCCGAGGTGAGCC | |
| | | | TGAACGTGGACACCCCCTTC | |
| | | | CCCCTGGAGGAGGAGCTGCA | |
| | | | GATCGAGCCCCTGAGCCTGG | |
| | | | ACGGCCTGAACATGCTGAGC | |
| | | | GACAGCAGCATGGGCCTGCT | |
| | | | GGACCCCAGCGTGGAGGAGA | |
| | | | CCTTCAGAGCCGACAGACTG | |
| | | | (SEQ ID NO: 1212) | |
| SAV1 | LPPGWSVDWTMRGRKYYIDH | HASGIGRVAATSLGNLTNHG | CACGCCAGCGGCATCGGCAG | −2.9035402 |
| | NTNTTHWSH | SEDLPLPPGWSVDWTMRGRK | AGTGGCCGCCACCAGCCTGG | |
| | (SEQ ID NO: 633) | YY!DHNTNTTHWSHPLEREGLPP | GCAACCTGACCAACCACGGC | |
| | | GWERVESSEFGTYYVDH | AGCGAGGACCTGCCCCTGCC | |
| | | (SEQ ID NO: 634) | CCCCGGATGGAGCGTGGACT | |
| | | | GGACCATGAGAGGCAGAAAG | |
| | | | TACTACATCGACCACAACAC | |
| | | | CAACACCACCCACTGGAGCC | |
| | | | ACCCCCTGGAGAGAGAGGGC | |
| | | | CTGCCCCCCGGATGGGAGAG | |
| | | | AGTGGAGAGCAGCGAGTTCG | |
| | | | GCACCTACTACGTGGACCAC | |
| | | | (SEQ ID NO: 1213) | |
| DPF1 | GEDFYREAIEHCRSYNARLC | PLSLGEDFYREAIEHCRSYN | CCCCTGAGCCTGGGCGAGGA | −2.7433919 |
| | AERSLRLPFLDSQTGVAQNN | ARLCAERSLRLPFLDSQTGV | CTTCTACAGAGAGGCCATCG | |
| | CYIWMEKTHRGPGLAPGQIY | AQNNCYIWMEKTHRGPGLAP | AGCACTGCAGAAGCTACAAC | |
| | TYPARCWRKKR | GQIYTYPARCWRKKRRLNIL | GCCAGACTGTGCGCCGAGAG | |
| | (SEQ ID NO: 635) | (SEQ ID NO: 636) | AAGCCTGAGACTGCCCTTCC | |
| | | | TGGACAGCCAGACCGGCGTG | |
| | | | GCCCAGAACAACTGCTACAT | |
| | | | CTGGATGGAGAAGACCCACA | |
| | | | GAGGCCCCGGCCTGGCCCCC | |
| | | | GGCCAGATCTACACCTACCC | |
| | | | CGCTAGATGCTGGAGAAAGA | |
| | | | AGAGAAGACTGAACATCCTG | |
| | | | (SEQ ID NO: 1214) | |
| ABL1 | VALYDFVASGDNTLSITKGE | KENLLAGPSENDPNLFVALY | AAGGAGAACCTGCTGGCCGG | −2.6728209 |
| | KLRVLGYNHNGEWCEAQTKN | DFVASGDNTLSITKGEKLRV | CCCCAGCGAGAACGACCCCA | |
| | GQGWVP | LGYNHNGEWCEAQTKNGQGW | ACCTGTTCGTGGCCCTGTAC | |
| | (SEQ ID NO: 637) | VPSNYITPVNSLEKHSWYHG | GACTTCGTGGCCAGCGGCGA | |
| | | (SEQ ID NO: 638) | CAACACCCTGAGCATCACCA | |
| | | | AGGGCGAGAAGCTGAGAGTG | |
| | | | CTGGGCTACAACCACAACGG | |
| | | | CGAGTGGTGCGAGGCCCAGA | |
| | | | CCAAGAACGGCCAGGGCTGG | |
| | | | GTGCCCAGCAACTACATCAC | |
| | | | CCCCGTGAACAGCCTGGAGA | |
| | | | AGCACAGCTGGTACCACGGC | |
| | | | (SEQ ID NO: 1215) | |
| WBP4 | VKTVWVEGLSEDGFTYYYNT | YYDLISGASQWEKPEGFQGD | TACTACGACCTGATCAGCGG | −2.6121807 |
| | ETGESRWEK | LKKTAVKTVWVEGLSEDGFT | CGCCAGCCAGTGGGAGAAGC | |
| | (SEQ ID NO: 639) | YYYNTETGESRWEKPDDFIP | CCGAGGGCTTCCAGGGCGAC | |
| | | HTSDLPSSKVNENSLGTLDE | CTGAAGAAGACCGCCGTGAA | |
| | | (SEQ ID NO: 640) | GACCGTGTGGGTGGAGGGCC | |
| | | | TGAGCGAGGACGGCTTCACC | |
| | | | TACTACTACAACACCGAGAC | |
| | | | CGGCGAGAGCAGATGGGAGA | |
| | | | AGCCCGACGACTTCATCCCC | |
| | | | CACACCAGCGACCTGCCCAG | |
| | | | CAGCAAGGTGAACGAGAACA | |
| | | | GCCTGGGCACCCTGGACGAG | |
| | | | (SEQ ID NO: 1216) | |
| BTK | VALYDYMPMNANDLQLRKGD | PEPAAAPVSTSELKKVVALY | CCCGAGCCCGCCGCCGCCCC | −2.5651252 |
| | EYFILEESNLPWWRARDKNG | DYMPMNANDLQLRKGDEYFI | CGTGAGCACCAGCGAGCTGA | |
| | QEGYIP | LEESNLPWWRARDKNGQEGY | AGAAGGTGGTGGCTCTGTAC | |
| | (SEQ ID NO: 641) | IPSNYVTEAEDSIEMYEWYS | GACTACATGCCCATGAACGC | |
| | | (SEQ ID NO: 642) | CAACGACCTGCAGCTGAGAA | |
| | | | AGGGCGACGAGTACTTCATC | |
| | | | CTGGAGGAGAGCAACCTGCC | |
| | | | CTGGTGGAGAGCCAGAGACA | |
| | | | AGAACGGCCAGGAGGGCTAC | |
| | | | ATCCCCAGCAACTACGTGAC | |
| | | | CGAGGCCGAGGACAGCATCG | |
| | | | AGATGTACGAGTGGTACAGC | |
| | | | (SEQ ID NO: 1217) | |
| SMRC2 | TREWTEQETLLLLEALEMYK | MYTKKNVPSKSKAAASATRE | ATGTACACCAAGAAGAACGT | −2.4978538 |
| | DDWNKVSEHVGSRTQDECIL | WTEQETLLLLEALEMYKDDW | GCCCAGCAAGAGCAAGGCCG | |
| | HFLRL | NKVSEHVGSRTQDECILHFL | CCGCCAGCGCCACCAGAGAG | |
| | (SEQ ID NO: 643) | RLPIEDPYLEDSEASLGPLA | TGGACCGAGCAGGAGACCCT | |
| | | (SEQ ID NO: 644) | GCTGCTGCTGGAGGCCCTGG | |
| | | | AGATGTACAAGGACGACTGG | |
| | | | AACAAGGTGAGCGAGCACGT | |
| | | | GGGCAGCAGAACCCAGGACG | |
| | | | AGTGCATCCTGCACTTCCTG | |
| | | | AGACTGCCCATCGAGGACCC | |
| | | | CTACCTGGAGGACAGCGAGG | |
| | | | CCAGCCTGGGCCCCCTGGCC | |
| | | | (SEQ ID NO: 1218) | |
| MTA3 | CESCYATQSHQWYSWGPPNM | GAVNGAVGTTFQPQNPLLGR | GGCGCCGTGAACGGCGCCGT | −2.4098352 |
| | QCRLCAICWLYWKKYGG | ACESCYATQSHQWYSWGPPN | GGGCACCACCTTCCAGCCCC | |
| | (SEQ ID NO: 645) | MQCRLCAICWLYWKKYGGLK | AGAACCCCCTGCTGGGCAGA | |
| | | MPTQSEEEKLSPSPTTEDPR | GCCTGCGAGAGCTGCTACGC | |
| | | (SEQ ID NO: 646) | CACCCAGAGCCACCAGTGGT | |
| | | | ACAGCTGGGGCCCCCCCAAC | |
| | | | ATGCAGTGCAGACTGTGCGC | |
| | | | CATCTGCTGGCTGTACTGGA | |
| | | | AGAAGTACGGCGGCCTGAAG | |
| | | | ATGCCCACCCAGAGCGAGGA | |
| | | | GGAGAAGCTGAGCCCCAGCC | |
| | | | CCACCACCGAGGACCCCAGA | |
| | | | (SEQ ID NO: 1219) | |
| WWTR1 | LPPGWEMTFTATGQRYFLNH | GAAGSPAQQHAHLRQQSYDV | GGCGCCGCCGGCAGCCCCGC | −2.3989581 |
| | IEKITTWQD | TDELPLPPGWEMTFTATGQR | CCAGCAGCACGCCCACCTGA | |
| | (SEQ ID NO: 647) | YFLNHIEKITTWQDPRKAMN | GACAACAAAGCTACGACGTG | |
| | | QPLNHMNLHPAVSSTPVPQR | ACCGACGAGCTGCCCCTGCC | |
| | | (SEQ ID NO: 648) | CCCCGGCTGGGAGATGACCT | |
| | | | TCACCGCCACCGGACAGAGA | |
| | | | TACTTCCTGAACCACATCGA | |
| | | | GAAGATCACCACCTGGCAGG | |
| | | | ACCCCAGAAAGGCCATGAAC | |
| | | | CAGCCCCTGAACCACATGAA | |
| | | | CCTGCACCCCGCCGTGAGCA | |
| | | | GCACCCCCGTGCCCCAGAGA | |
| | | | (SEQ ID NO: 1220) | |
| EGR3 | GKFAFDSPSNWCQDNIISLM | TVTYLGKFAFDSPSNWCQDN | ACCGTGACCTACCTGGGCAA | −2.337045 |
| | SAGILGVPPASGALSTQTST | IISLMSAGILGVPPASGALS | GTTCGCCTTCGACAGCCCCA | |
| | ASMVQPPQGDVEAMYPALPP | TQTSTASMVQPPQGDVEAMY | GCAACTGGTGCCAGGACAAC | |
| | YSNCGDLYS | PALPPYSNCGDLYSEPVSFH | ATCATCAGCCTGATGAGCGC | |
| | (SEQ ID NO: 649) | (SEQ ID NO: 650) | CGGCATCCTGGGCGTGCCCC | |
| | | | CCGCTAGCGGAGCTCTGAGC | |
| | | | ACACAGACCAGCACCGCCAG | |
| | | | CATGGTGCAGCCCCCCCAGG | |
| | | | GCGACGTGGAGGCCATGTAC | |
| | | | CCCGCCCTTCCTCCCTACAG | |
| | | | CAACTGCGGCGACCTGTACA | |
| | | | GCGAGCCCGTGAGCTTCCAC | |
| | | | (SEQ ID NO: 1221) | |
| NFIX | LTQDEFHPFIEALLPHVRAF | YSPYCLTQDEFHPFIEALLP | TACAGCCCCTACTGCCTGAC | −2.289111 |
| | SYTWFNLQARKRKYFKKHE | HVRAFSYTWFNLQARKRKYF | CCAGGACGAGTTCCACCCCT | |
| | (SEQ ID NO: 651) | KKHEKRMSKDEERAVKDELL | TCATCGAGGCCCTGCTGCCC | |
| | | GEKPEIKQKWASRLLAKLRK | CACGTGAGAGCCTTCAGCTA | |
| | | (SEQ ID NO: 652) | CACCTGGTTCAACCTGCAGG | |
| | | | CCAGAAAGAGAAAGTACTTC | |
| | | | AAGAAGCACGAGAAGAGAAT | |
| | | | GAGCAAGGACGAGGAGAGAG | |
| | | | CCGTGAAGGACGAGCTGCTG | |
| | | | GGCGAGAAGCCCGAGATCAA | |
| | | | GCAGAAGTGGGCCAGCAGAC | |
| | | | TGCTGGCCAAGCTGAGAAAG | |
| | | | (SEQ ID NO: 1222) | |
| KPCI | SGEFGLDNFDSQFTNEPVQL | QGHPFFRNVDWDMMEQKQVV | CAGGGCCACCCCTTCTTCAG | −2.2334296 |
| | TPDDDDIVRKIDQSEFEGFE | PPFKPNISGEFGLDNFDSQF | AAACGTGGACTGGGACATGA | |
| | (SEQ ID NO: 653) | TNEPVQLTPDDDDIVRKIDQ | TGGAGCAGAAGCAGGTGGTG | |
| | | SEFEGFEYINPLLMSAEECV | CCCCCCTTCAAGCCCAACAT | |
| | | (SEQ ID NO: 654) | CAGCGGCGAGTTCGGCCTGG | |
| | | | ACAACTTCGACAGCCAGTTC | |
| | | | ACCAACGAGCCCGTGCAGCT | |
| | | | GACCCCCGACGACGACGACA | |
| | | | TCGTGAGAAAGATCGACCAG | |
| | | | AGCGAGTTCGAGGGCTTCGA | |
| | | | GTACATCAACCCCCTGCTGA | |
| | | | TGAGCGCCGAGGAGTGCGTG | |
| | | | (SEQ ID NO: 1223) | |
| LMBL1 | MKLEAVDRRNPALIRVASVE | SFLVNMKLEAVDRRNPALIR | AGCTTCCTGGTGAACATGAA | −2.2075416 |
| | DVEDHREKIHFDGWSHGYDF | VASVEDVEDHRIKIHFDGWS | GCTGGAGGCCGTGGACAGAA | |
| | WIDADHPDIHPAGWCSKTGH | HGYDFWIDADHPDIHPAGWC | GAAACCCCGCCCTGATCAGA | |
| | PLQPPLGP | SKTGHPLQPPLGPREPSSAS | GTGGCCAGCGTGGAGGACGT | |
| | (SEQ ID NO: 655) | (SEQ ID NO: 656) | GGAGGACCACAGAATCAAGA | |
| | | | TCCACTTCGACGGCTGGAGC | |
| | | | CACGGCTACGACTTCTGGAT | |
| | | | CGACGCCGACCACCCCGACA | |
| | | | TCCACCCCGCCGGCTGGTGC | |
| | | | AGCAAGACCGGACACCCCCT | |
| | | | GCAGCCTCCTCTGGGCCCCA | |
| | | | GAGAGCCCAGCAGCGCTAGC | |
| | | | (SEQ ID NO: 1224) | |
| NOTC1 | WKNCTQSLQCWKYFSDGHCD | LQCNNHACGWDGGDCSLNFN | CTGCAGTGCAACAACCACGC | −2.1840238 |
| | SQCNSAGCLFDGFDC | DPWKNCTQSLQCWKYFSDGH | CTGCGGCTGGGACGGCGGCG | |
| | (SEQ ID NO: 657) | CDSQCNSAGCLFDGFDCQRA | ACTGCAGCCTGAACTTCAAC | |
| | | EGQCNPLYDQYCKDHFSDGH | GACCCCTGGAAGAACTGCAC | |
| | | (SEQ ID NO: 658) | CCAGAGCCTGCAGTGCTGGA | |
| | | | AGTACTTCAGCGACGGCCAC | |
| | | | TGCGACAGCCAGTGCAACAG | |
| | | | CGCCGGCTGCCTGTTCGACG | |
| | | | GCTTCGACTGCCAGAGAGCC | |
| | | | GAGGGCCAGTGCAACCCCCT | |
| | | | GTACGACCAGTACTGCAAGG | |
| | | | ACCACTTCAGCGACGGCCAC | |
| | | | (SEQ ID NO: 1225) | |
| FIGN | TDLSAIMPSQLRPVTYQDFE | LLVQRTEGFSGLDVAHLCQE | CTGCTGGTGCAGAGAACCGA | −2.1805996 |
| | NAFCKIQPSISQKELDMYVE | AVVGPLHAMPATDLSAIMPS | GGGCTTCAGCGGCCTGGACG | |
| | WNKMF | QLRPVTYQDFENAFCKIQPS | TGGCCCACCTGTGCCAGGAG | |
| | (SEQ ID NO: 659) | ISQKELDMYVEWNKMFGCSQ | GCCGTGGTGGGACCTCTGCA | |
| | | (SEQ ID NO: 660) | CGCCATGCCCGCCACCGACC | |
| | | | TGAGCGCCATCATGCCCAGC | |
| | | | CAGCTGAGACCCGTGACCTA | |
| | | | CCAGGACTTCGAGAACGCCT | |
| | | | TCTGCAAGATCCAGCCCAGC | |
| | | | ATCAGCCAGAAGGAGCTGGA | |
| | | | CATGTACGTGGAGTGGAACA | |
| | | | AGATGTTCGGCTGCAGCCAG | |
| | | | (SEQ ID NO: 1226) | |
| IMA5 | NPYCALIEEAYGLDKIEFLQ | RLGEQEAKRNGTGINPYCAL | AGACTGGGCGAGCAGGAGGC | −2.15155 |
| | SHENQEIYQKAFDLIEHYFG | IEEAYGLDKIEFLQSHENQE | CAAGAGAAACGGCACCGGCA | |
| | TEDEDSSIAPQ | IYQKAFDLIEHYFGTEDEDS | TCAACCCCTACTGCGCCCTG | |
| | (SEQ ID NO: 661) | SIAPQVDLNQQQYIFQQCEA | ATCGAGGAGGCCTACGGCCT | |
| | | (SEQ ID NO: 662) | GGACAAGATCGAGTTCCTGC | |
| | | | AGAGCCACGAGAACCAGGAG | |
| | | | ATCTACCAGAAGGCCTTCGA | |
| | | | CCTGATCGAGCACTACTTCG | |
| | | | GCACCGAGGACGAGGACAGC | |
| | | | AGCATCGCCCCCCAGGTGGA | |
| | | | CCTGAACCAGCAGCAGTACA | |
| | | | TCTTCCAGCAGTGCGAGGCC | |
| | | | (SEQ ID NO: 1227) | |
| ZN496 | PFKDMILCFSEEDWSLLDPA | QEENVRDTQQVTTLQLPPSR | CAGGAGGAGAACGTGAGAGA | −2.1412028 |
| | QTGFYGEFIIGEDY | VSPFKDMILCFSEEDWSLLD | CACCCAGCAGGTGACCACCC | |
| | (SEQ ID NO: 663) | PAQTGFYGEFIIGEDYGVSM | TGCAGCTGCCCCCCAGCAGA | |
| | | PPNDLAAQPDLSQGEENEPR | GTGAGCCCCTTCAAGGACAT | |
| | | (SEQ ID NO: 664) | GATCCTGTGCTTCAGCGAGG | |
| | | | AGGACTGGAGCCTGCTGGAC | |
| | | | CCCGCCCAGACCGGCTTCTA | |
| | | | CGGCGAGTTCATCATCGGCG | |
| | | | AGGACTACGGCGTGAGCATG | |
| | | | CCCCCCAACGACCTGGCCGC | |
| | | | CCAGCCCGACCTTAGCCAGG | |
| | | | GCGAGGAGAACGAGCCCAGA | |
| | | | (SEQ ID NO: 1228) | |

TABLE 3
KRAB Repressor Mutants

| | | | | Norm Avg |
|---|---|---|---|---|
| | Start | | | D13 |
| | of | | | (0 = Wild |
| | Muta- | Amino Acid | | Type |
| Variant | tion | sequence | DNA sequence | score) |
| GlutamicAcid; | 5 | DAKSLEEESRTLVTFKDVFV | GATGCCAAGTCCCTTGAGGA | 1.28823665 |
| 3; 5 | | DFTREEWKLLDTAQQIVYRN | GGAGTCTCGGACCCTGGTTA | |
| | | VMLENYKNLVSLGYQLTKPD | CCTTTAAGGATGTGTTCGTC | |
| | | VILRLEKGEEP | GACTTCACTAGGGAAGAATG | |
| | | (SEQ ID NO: 665) | GAAACTACTAGACACAGCAC | |
| | | | AACAAATAGTATACAGAAAC | |
| | | | GTAATGCTAGAAAACTACAA | |
| | | | AAACCTAGTAAGCCTAGGAT | |
| | | | ACCAACTAACAAAACCAGAC | |
| | | | GTAATACTAAGACTAGAAAA | |
| | | | AGGAGAAGAACCA | |
| | | | (SEQ ID NO: 1229) | |
| GlutamicAcid; | 7 | DAKSLTAEEETLVTFKDVFV | GATGCCAAGTCCTTGACCGC | 1.14468005 |
| 3; 7 | | DFTREEWKLLDTAQQIVYRN | TGAGGAGGAGACCCTGGTCA | |
| | | VMLENYKNLVSLGYQLTKPD | CTTTCAAGGACGTTTTTGTG | |
| | | VILRLEKGEEP | GATTTCACGAGGGAAGAATG | |
| | | (SEQ ID NO: 666) | GAAACTACTAGACACAGCAC | |
| | | | AACAAATAGTATACAGAAAC | |
| | | | GTAATGCTAGAAAACTACAA | |
| | | | AAACCTAGTAAGCCTAGGAT | |
| | | | ACCAACTAACAAAACCAGAC | |
| | | | GTAATACTAAGACTAGAAAA | |
| | | | AGGAGAAGAACCA | |
| | | | (SEQ ID NO: 1230) | |
| AsparticAcid; | 7 | DAKSLTADDDTLVTFKDVFV | GATGCTAAGTCCCTGACCGC | 1.10622079 |
| 3; 7 | | DFTREEWKLLDTAQQIVYRN | CGATGATGACACCCTTGTGA | |
| | | VMLENYKNLVSLGYQLTKPD | CTTTTAAGGATGTCTTCGTT | |
| | | VILRLEKGEEP | GACTTCACGAGGGAAGAATG | |
| | | (SEQ ID NO: 667) | GAAACTACTAGACACAGCAC | |
| | | | AACAAATAGTATACAGAAAC | |
| | | | GTAATGCTAGAAAACTACAA | |
| | | | AAACCTAGTAAGCCTAGGAT | |
| | | | ACCAACTAACAAAACCAGAC | |
| | | | GTAATACTAAGACTAGAAAA | |
| | | | AGGAGAAGAACCA | |
| | | | (SEQ ID NO: 1231) | |
| Isoleucine; | 67 | DAKSLTAWSRTLVTFKDVFV | GATGCTAAGTCTCTGACCGC | 1.08345235 |
| 3; 67 | | DFTREEWKLLDTAQQIVYRN | CTGGTCCCGGACTCTTGTTA | |
| | | VMLENYKNLVSLGYQLTKPD | CGTTTAAGGACGTGTTCGTC | |
| | | VILRLEKIIIP | GATTTCACCAGGGAAGAATG | |
| | | (SEQ ID NO: 668) | GAAACTACTAGACACAGCAC | |
| | | | AACAAATAGTATACAGAAAC | |
| | | | GTAATGCTAGAGAACTACAA | |
| | | | AAACCTAGTAAGCCTAGGAT | |
| | | | ACCAACTCACAAAACCAGAC | |
| | | | GTAATACTAAGACTAGAAAA | |
| | | | AATAATAATACCA | |
| | | | (SEQ ID NO: 1232) | |
| Proline; | 6 | DAKSLTPPPRTLVTFKDVFV | GATGCCAAGTCCCTTACCCC | 1.06556067 |
| 3; 6 | | DFTREEWKLLDTAQQIVYRN | CCCTCCCCGGACTCTGGTGA | |
| | | VMLENYKNLVSLGYQLTKPD | CGTTTAAGGATGTCTTCGTT | |
| | | VILRLEKGEEP | GACTTCACCAGGGAAGAATG | |
| | | (SEQ ID NO: 669) | GAAACTACTAGACACAGCAC | |
| | | | AACAAATAGTATACAGAAAC | |
| | | | GTAATGCTAGAAAACTACAA | |
| | | | AAACCTAGTAAGCCTAGGAT | |
| | | | ACCAACTAACAAAACCAGAC | |
| | | | GTAATACTAAGACTAGAAAA | |
| | | | AGGAGAAGAACCA | |
| | | | (SEQ ID NO: 1233) | |
| Asparagine; | 1 | DNKSLTAWSRTLVTFKDVFV | GATAATAAGTCCCTTACCGC | 1.05496491 |
| 1; 1 | | DFTREEWKLLDTAQQIVYRN | CTGGTCTCGGACGCTGGTTA | |
| | | VMLENYKNLVSLGYQLTKPD | CTTTCAAGGACGTCTTCGTG | |
| | | VILRLEKGEEP | GATTTTACCAGGGAAGAATG | |
| | | (SEQ ID NO: 670) | GAAACTACTAGACACAGCAC | |
| | | | AACAAATAGTATACAGAAAC | |
| | | | GTAATGCTAGAAAACTACAA | |
| | | | AAACCTAGTAAGCCTAGGAT | |
| | | | ACCAACTAACAAAACCAGAC | |
| | | | GTAATACTAAGACTAGAAAA | |
| | | | AGGAGAAGAACCA | |
| | | | (SEQ ID NO: 1234) | |
| Proline; | 9 | DAKSLTAWSPPPVTFKDVFV | GATGCTAAGTCTTTGACTGC | 1.05426168 |
| 3; 9 | | DFTREEWKLLDTAQQIVYRN | CTGGTCCCCTCCCCCCGTTA | |
| | | VMLENYKNLVSLGYQLTKPD | CCTTCAAGGATGTGTTTGTC | |
| | | VILRLEKGEEP | GACTTCACCAGGGAAGAATG | |
| | | (SEQ ID NO: 671) | GAAACTACTAGACACAGCAC | |
| | | | AACAAATAGTATACAGAAAC | |
| | | | GTAATGCTAGAAAACTACAA | |
| | | | AAACCTAGTAAGCCTAGGAT | |
| | | | ACCAACTAACAAAACCAGAC | |
| | | | GTAATACTAAGACTAGAAAA | |
| | | | AGGAGAAGAACCA | |
| | | | (SEQ ID NO: 1235) | |
| GlutamicAcid; | 6 | DAKSLTEESRTLVTFKDVFV | GACGCCAAGTCCCTGACGGA | 1.04111335 |
| 2; 6 | | DFTREEWKLLDTAQQIVYRN | GGAGTCTCGGACCCTTGTGA | |
| | | VMLENYKNLVSLGYQLTKPD | CTTTTAAGGATGTCTTCGTT | |
| | | VILRLEKGEEP | GATTTCACCAGGGAAGAATG | |
| | | (SEQ ID NO: 672) | GAAACTACTAGACACAGCAC | |
| | | | AACAAATAGTATACAGAAAC | |
| | | | GTAATGCTAGAAAACTACAA | |
| | | | AAACCTAGTAAGCCTAGGAT | |
| | | | ACCAACTAACAAAACCAGAC | |
| | | | GTAATACTAAGACTAGAAAA | |
| | | | AGGAGAAGAACCA | |
| | | | (SEQ ID NO: 1236) | |
| Alanine; | 7 | DAKSLTAAARTLVTFKDVFV | GACGCTAAGTCCCTTACCGC | 1.04035858 |
| 2; 7 | | DFTREEWKLLDTAQQĮVYRN | CGCCGCGAGGACCCTGGTTA | |
| | | VMLENYKNLVSLGYQLTKPD | CTTTTAAGGATGTCTTCGTG | |
| | | VILRLEKGEEP | GATTTCACGCGGGAAGAATG | |
| | | (SEQ ID NO: 673) | GAAACTACTAGACACAGCAC | |
| | | | AACAAATAGTATACAGAAAC | |
| | | | GTAATGCTAGAAAACTACAA | |
| | | | AAACCTAGTAAGCCTAGGAT | |
| | | | ACCAACTAACAAAACCAGAC | |
| | | | GTAATACTAAGACTAGAAAA | |
| | | | AGGAGAAGAACCA | |
| | | | (SEQ ID NO: 1237) | |
| Valine; | 4 | DAKSVTAWSRTLVTFKDVFV | GATGCCAAGTCTGTGACCGC | 0.96430263 |
| 1; 4 | | DFTREEWKLLDTAQQUIVYR | TTGGTCCCGGACGCTTGTCA | |
| | | NVMLENYKNLVSLGYQLTKP | CCTTCAAGGACGTTTTTGTG | |
| | | DVILRLEKGEEP | GATTTCACTAGGGAAGAATG | |
| | | (SEQ ID NO: 674) | GAAACTACTAGACACAGCAC | |
| | | | AACAAATAGTATACAGAAAC | |
| | | | GTAATGCTAGAAAACTACAA | |
| | | | AAACCTAGTAAGCCTAGGAT | |
| | | | ACCAACTAACAAAACCAGAC | |
| | | | GTAATACTAAGACTAGAAAA | |
| | | | AGGAGAAGAACCA | |
| | | | (SEQ ID NO: 1238) | |
| Proline; | 7 | DAKSLTAPSRTLVTFKDVFV | GATGCTAAGTCTCTTACCGC | 0.96424497 |
| 1; 7 | | DFTREEWKLLDTAQQIVYRN | CCCCTCCCGGACTCTGGTCA | |
| | | VMLENYKNLVSLGYQLTKPD | CCTTCAAGGACGTGTTCGTT | |
| | | VILRLEKGEEP | GATTTTACGAGGGAAGAATG | |
| | | (SEQ ID NO: 675) | GAAACTACTAGACACAGCAC | |
| | | | AACAAATAGTATACAGAAAC | |
| | | | GTAATGCTAGAAAACTACAA | |
| | | | AAACCTAGTAAGCCTAGGAT | |
| | | | ACCAACTAACAAAACCAGAC | |
| | | | GTAATACTAAGACTAGAAAA | |
| | | | AGGAGAAGAACCA | |
| | | | (SEQ ID NO: 1239) | |
| Glycine; | 7 | DAKSLTAGGRTLVTFKDVFV | GACGCCAAGTCCCTTACCGC | 0.94837463 |
| 2; 7 | | DFTREEWKLLDTAQQIVYRN | TGGCGGGCGGACCCTGGTGA | |
| | | VMLENYKNIVSLGYQLTKPD | CTTTCAAGGATGTTTTCGTC | |
| | | VILRLEKGEEP | GATTTTACGAGGGAAGAATG | |
| | | (SEQ ID NO: 676) | GAAACTACTAGACACAGCAC | |
| | | | AACAAATAGTATACAGAAAC | |
| | | | GTAATGCTAGAAAACTACAA | |
| | | | AAACCTAGTAAGCCTAGGAT | |
| | | | ACCAACTAACAAAACCAGAC | |
| | | | GTAATACTAAGACTAGAAAA | |
| | | | AGGAGAAGAACCA | |
| | | | (SEQ ID NO: 1240) | |
| Asparagine; | 5 | DAKSLNNNSRTLVTFKDVFV | GATGCCAAGTCTCTTAATAA | 0.92066978 |
| 3; 5 | | DFTREEWKLLDTAQQIVYRN | TAATTCCCGGACTCTGGTGA | |
| | | VMLENYKNLVSLGYQLTKPD | CCTTTAAGGACGTTTTCGTC | |
| | | VILRLEKGEEP | GATTTCACCAGGGAAGAATG | |
| | | (SEQ ID NO: 677) | GAAACTACTAGACACAGCAC | |
| | | | AACAAATAGTATACAGAAAC | |
| | | | GTAATGCTAGAAAACTACAA | |
| | | | AAACCTAGTAAGCCTAGGAT | |
| | | | ACCAACTAACAAAACCAGAC | |
| | | | GTAATACTAAGACTAGAAAA | |
| | | | AGGAGAAGAACCA | |
| | | | (SEQ ID NO: 1241) | |
| Glutamine; | 7 | DAKSLTAQQQTLVTFKDVFV | GATGCCAAGTCCCTTACCGC | 0.91183545 |
| 3; 7 | | DFTREEWKLLDTAQQIVYRN | TCAGCAGCAGACTCTGGTCA | |
| | | VMLENYKNLVSLGYQLTKPD | CGTTCAAGGACGTTTTTGTG | |
| | | VILRLEKGEEP | GATTTCACCAGGGAAGAATG | |
| | | (SEQ ID NO: 678) | GAAACTACTAGACACAGCAC | |
| | | | AACAAATAGTATACAGAAAC | |
| | | | GTAATGCTAGAAAACTACAA | |
| | | | AAACCTAGTAAGCCTAGGAT | |
| | | | ACCAACTAACAAAACCAGAC | |
| | | | GTAATACTAAGACTAGAAAA | |
| | | | AGGAGAAGAACCA | |
| | | | (SEQ ID NO: 1242) | |
| Proline; | 10 | DAKSLTAWSRPPVTFKDVFV | GATGCTAAGTCTCTTACTGC | 0.89572995 |
| 2; 10 | | DFTREEWKLLDTAQQIVYRN | CTGGTCCCGGCCTCCCGTGA | |
| | | VMLENYKNLVSLGYQLTKPD | CCTTCAAGGATGTCTTCGTT | |
| | | VILRLEKGEEP | GACTTTACCAGGGAAGAATG | |
| | | (SEQ ID NO: 679) | GAAACTACTAGACACAGCAC | |
| | | | AACAAATAGTATACAGAAAC | |
| | | | GTAATGCTAGAAAACTACAA | |
| | | | AAACCTAGTAAGCCTAGGAT | |
| | | | ACCAACTAACAAAACCAGAC | |
| | | | GTAATACTAAGACTAGAAAA | |
| | | | AGGAGAAGAACCA | |
| | | | (SEQ ID NO: 1243) | |
| Threonine; | 7 | DAKSLTATTRTLVTFKDVFV | GACGCTAAGTCCCTGACCGC | 0.88884291 |
| 2; 7 | | DFTREEWKLLDTAQQIVYRN | CACGACCCGGACTCTTGTCA | |
| | | VMLENYKNLVSLGYQLTKPD | CTTTCAAGGATGTGTTCGTT | |
| | | VILRLEKGEEP | GATTTTACCAGGGAAGAATG | |
| | | (SEQ ID NO: 680) | GAAACTACTAGACACAGCAC | |
| | | | AACAAATAGTATACAGAAAC | |
| | | | GTAATGCTAGAAAACTACAA | |
| | | | AAACCTAGTAAGCCTAGGAT | |
| | | | ACCAACTAACAAAACCAGAC | |
| | | | GTAATACTAAGACTAGAAAA | |
| | | | AGGAGAAGAACCA | |
| | | | (SEQ ID NO: 1244) | |
| GlutamicAcid; | 10 | DAKSLTAWSREEVTFKDVFV | GATGCCAAGTCTCTTACCGC | 0.86791044 |
| 2; 10 | | DFTREEWKLLDTAQQIVYRN | TTGGTCCAGGGAGGAGGTCA | |
| | | VMLENYKNLVSLGYQLTKPD | CTTTCAAGGACGTGTTCGTT | |
| | | VILRLEKGEEP | GATTTTACCCGGGAAGAATG | |
| | | (SEQ ID NO: 681) | GAAACTACTAGACACAGCAC | |
| | | | AACAAATAGTATACAGAAAC | |
| | | | GTAATGCTAGAAAACTACAA | |
| | | | AAACCTAGTAAGCCTAGGAT | |
| | | | ACCAACTAACAAAACCAGAC | |
| | | | GTAATACTAAGACTAGAAAA | |
| | | | AGGAGAAGAACCA | |
| | | | (SEQ ID NO: 1245) | |
| AsparticAcid; | 7 | DAKSLTADDRTLVTFKDVFV | GATGCCAAGTCCCTTACCGC | 0.86480685 |
| 2; 7 | | DFTREEWKLLDTAQQIVYRN | TGATGACCGGACCCTGGTCA | |
| | | VMLENYKNLVSLGYQLTKPD | CGTTCAAGGATGTGTTTGTT | |
| | | VILRLEKGEEP | GACTTCACTAGGGAAGAATG | |
| | | (SEQ ID NO: 682) | GAAACTACTAGACACAGCAC | |
| | | | AACAAATAGTATACAGAAAC | |
| | | | GTAATGCTAGAAAACTACAA | |
| | | | AAACCTAGTAAGCCTAGGAT | |
| | | | ACCAACTAACAAAACCAGAC | |
| | | | GTAATACTAAGACTAGAAAA | |
| | | | AGGAGAAGAACCA | |
| | | | (SEQ ID NO: 1246) | |
| Glutamine; | 6 | DAKSLTQQQRTLVTFKDVFV | GATGCCAAGTCCCTTACGCA | 0.86314843 |
| 3; 6 | | DFTREEWKLLDTAQQIVYRN | GCAGCAGCGGACTCTGGTTA | |
| | | VMLENYKNLVSLGYQLTKPD | CCTTCAAGGACGTGTTTGTC | |
| | | VILRLEKGEEP | GATTTCACCAGGGAAGAATG | |
| | | (SEQ ID NO: 683) | GAAACTACTAGACACAGCAC | |
| | | | AACAAATAGTATACAGAAAC | |
| | | | GTAATGCTAGAAAACTACAA | |
| | | | AAACCTAGTAAGCCTAGGAT | |
| | | | ACCAACTAACAAAACCAGAC | |
| | | | GTAATACTAAGACTAGAAAA | |
| | | | AGGAGAAGAACCA | |
| | | | (SEQ ID NO: 1247) | |
| GlutamicAcid; | 4 | DAKSEEEWSRTLVTFKDVFV | GACGCCAAGTCCGAGGAGGA | 0.84553985 |
| 3; 4 | | DFTREEWKLLDTAQQIVYRN | GTGGTCTAGGACCCTTGTCA | |
| | | VMLENYKNLVSLGYQLTKPD | CCTTTAAGGATGTTTTCGTG | |
| | | VILRLEKGEEP | GATTTCACTCGGGAAGAATG | |
| | | (SEQ ID NO: 684) | GAAACTACTAGACACAGCAC | |
| | | | AACAAATAGTATACAGAAAC | |
| | | | GTAATGCTAGAAAACTACAA | |
| | | | AAACCTAGTAAGCCTAGGAT | |
| | | | ACCAACTAACAAAACCAGAC | |
| | | | GTAATACTAAGACTAGAAAA | |
| | | | AGGAGAAGAACCA | |
| | | | (SEQ ID NO: 1248) | |
| AsparticAcid; | 6 | DAKSLTDDSRTLVTFKDVFV | GATGCCAAGTCCCTTACCGA | 0.84522896 |
| 2; 6 | | DFTREEWKLLDTAQQIVYRN | CGACTCTAGGACGCTGGTTA | |
| | | VMLENYKNLVSLGYQLTKPD | CTTTTAAGGATGTGTTCGTC | |
| | | VILRLEKGEEP | GATTTCACCCGGGAAGAATG | |
| | | (SEQ ID NO: 685) | GAAACTACTAGACACAGCAC | |
| | | | AACAAATAGTATACAGAAAC | |
| | | | GTAATGCTAGAAAACTACAA | |
| | | | AAACCTAGTAAGCCTAGGAT | |
| | | | ACCAACTAACAAAACCAGAC | |
| | | | GTAATACTAAGACTAGAAAA | |
| | | | AGGAGAAGAACCA | |
| | | | (SEQ ID NO: 1249) | |
| Asparagine; | 7 | DAKSLTANNRTLVTFKDVFV | GACGCTAAGTCCCTGACGGC | 0.84228978 |
| 2; 7 | | DFTREEWKLLDTAQQIVYRN | CAATAATCGGACCCTTGTTA | |
| | | VMLENYKNIVSLGYQLTKPD | CCTTTAAGGATGTGTTCGTC | |
| | | VILRLEKGEEP | GATTTCACTAGGGAAGAATG | |
| | | (SEQ ID NO: 686) | GAAACTACTAGACACAGCAC | |
| | | | AACAAATAGTATACAGAAAC | |
| | | | GTAATGCTAGAAAACTACAA | |
| | | | AAACCTAGTAAGCCTAGGAT | |
| | | | ACCAACTAACAAAACCAGAC | |
| | | | GTAATACTAAGACTAGAAAA | |
| | | | AGGAGAAGAACCA | |
| | | | (SEQ ID NO: 1250) | |
| Asparagine; | 0 | NNNSLTAWSRTLVTFKDVFV | AATAATAATTCTCTTACCGC | 0.83772353 |
| 3; 0 | | DFTREEWKLLDTAQQIVYRN | CTGGTCCAGGACGCTGGTGA | |
| | | VMLENYKNLVSLGYQLTKPD | CCTTCAAGGATGTTTTTGTC | |
| | | VILRLEKGEEP | GATTTCACTCGGGAAGAATG | |
| | | (SEQ ID NO: 687) | GAAACTACTAGACACAGCAC | |
| | | | AACAAATAGTATACAGAAAC | |
| | | | GTAATGCTAGAAAACTACAA | |
| | | | AAACCTAGTAAGCCTAGGAT | |
| | | | ACCAACTAACAAAACCAGAC | |
| | | | GTAATACTAAGACTAGAAAA | |
| | | | AGGAGAAGAACCA | |
| | | | (SEQ ID NO: 1251) | |
| Glycine; | 5 | DAKSLGGGSRTLVTFKDVFV | GATGCCAAGTCCCTGGGCGG | 0.83010312 |
| 3; 5 | | DFTREEWKLLDTAQQIVYRN | TGGGTCTCGGACCCTTGTTA | |
| | | VMLENYKNIVSLGYQLTKPD | CTTTTAAGGACGTGTTCGTC | |
| | | VILRLEKGEEP | GATTTCACCAGGGAAGAATG | |
| | | (SEQ ID NO: 688) | GAAACTACTAGACACAGCAC | |
| | | | AACAAATAGTATACAGAAAC | |
| | | | GTAATGCTAGAAAACTACAA | |
| | | | AAACCTAGTAAGCCTAGGAT | |
| | | | ACCAACTAACAAAACCAGAC | |
| | | | GTAATACTAAGACTAGAAAA | |
| | | | AGGAGAAGAACCA | |
| | | | (SEQ ID NO: 1252) | |
| AsparticAcid; | 6 | DAKSLTDDDRTLVTFKDVFV | GATGCCAAGTCCCTTACCGA | 0.82122205 |
| 3; 6 | | DFTREEWKLLDTAQQIVYRN | CGACGATAGGACTCTGGTTA | |
| | | VMLENYKNLVSLGYQLTKPD | CCTTCAAGGATGTGTTCGTC | |
| | | VILRLEKGEEP | GATTTTACGCGGGAAGAATG | |
| | | (SEQ ID NO: 689) | GAAACTACTAGACACAGCAC | |
| | | | AACAAATAGTATACAGAAAC | |
| | | | GTAATGCTAGAAAACTACAA | |
| | | | AAACCTAGTAAGCCTAGGAT | |
| | | | ACCAACTAACAAAACCAGAC | |
| | | | GTAATACTAAGACTAGAAAA | |
| | | | AGGAGAAGAACCA | |
| | | | (SEQ ID NO: 1253) | |
| AsparticAcid; | 5 | DAKSLDDDSRTLVTFKDVFV | GATGCCAAGTCTCTGGACGA | 0.81720761 |
| 3; 5 | | DFTREEWKLLDTAQQIVYRN | TGATTCCCGGACCCTTGTCA | |
| | | VMLENYKNLVSLGYQLTKPD | CCTTTAAGGATGTGTTCGTT | |
| | | VILRLEKGEEP | GACTTCACTAGGGAAGAATG | |
| | | (SEQ ID NO: 690) | GAAACTACTAGACACAGCAC | |
| | | | AACAAATAGTATACAGAAAC | |
| | | | GTAATGCTAGAAAACTACAA | |
| | | | AAACCTAGTAAGCCTAGGAT | |
| | | | ACCAACTAACAAAACCAGAC | |
| | | | GTAATACTAAGACTAGAAAA | |
| | | | AGGAGAAGAACCA | |
| | | | (SEQ ID NO: 1254) | |
| Lysine; | 62 | DAKSLTAWSRTLVTFKDVFV | GACGCCAAGTCTCTGACTGC | 0.79372667 |
| 2; 62 | | DFTREEWKLLDTAQQIVYRN | TTGGTCCCGGACCCTGGTGA | |
| | | VMLENYKNLVSLGYQLTKPD | CGTTTAAGGATGTCTTCGTT | |
| | | VIKKLEKGEEP | GATTTCACCAGGGAAGAATG | |
| | | (SEQ ID NO: 691) | GAAACTACTAGACACAGCAC | |
| | | | AACAAATAGTATACAGAAAC | |
| | | | GTAATGCTAGAAAACTACAA | |
| | | | AAACCTAGTAAGCCTAGGAT | |
| | | | ACCAACTAACAAAACCAGAC | |
| | | | GTAATAAAAAAACTAGAAAA | |
| | | | AGGAGAAGAACCA | |
| | | | (SEQ ID NO: 1255) | |
| AsparticAcid; | 7 | DAKSLTADSRTLVTFKDVFV | GATGCTAAGTCCCTTACCGC | 0.77854784 |
| 1; 7 | | DFTREEWKLLDTAQQIVYRN | CGATTCTAGGACGCTGGTGA | |
| | | VMLENYKNLVSLGYQLTKPD | CCTTCAAGGATGTCTTTGTT | |
| | | VILRLEKGEEP | GACTTCACTCGGGAAGAATG | |
| | | (SEQ ID NO: 692) | GAAACTACTAGACACAGCAC | |
| | | | AACAAATAGTATACAGAAAC | |
| | | | GTAATGCTAGAAAACTACAA | |
| | | | AAACCTAGTAAGCCTAGGAT | |
| | | | ACCAACTAACAAAACCAGAC | |
| | | | GTAATACTAAGACTAGAAAA | |
| | | | AGGAGAAGAACCA | |
| | | | (SEQ ID NO: 1256) | |
| Lysine; | 5 | DAKSLKKKSRTLVTFKDVFV | GATGCCAAGTCTCTGAAGAA | 0.76670536 |
| 3; 5 | | DFTREEWKLLDTAQQIVYRN | GAAGTCCCGGACCCTTGTCA | |
| | | VMLENYKNLVSLGYQLTKPD | CTTTCAAGGACGTTTTTGTG | |
| | | VILRLEKGEEP | GATTTCACCAGGGAAGAATG | |
| | | (SEQ ID NO: 693) | GAAACTACTAGACACAGCAC | |
| | | | AACAAATAGTATACAGAAAC | |
| | | | GTAATGCTAGAAAACTACAA | |
| | | | AAACCTAGTAAGCCTAGGAT | |
| | | | ACCAACTAACAAAACCAGAC | |
| | | | GTAATACTAAGACTAGAAAA | |
| | | | AGGAGAAGAACCA | |
| | | | (SEQ ID NO: 1257) | |
| GlutamicAcid; | 7 | DAKSLTAESRTLVTFKDVFV | GATGCCAAGTCTCTGACCGC | 0.76316547 |
| 1; 7 | | DFTREEWKLLDTAQQIVYRN | TGAGTCCAGGACTCTTGTTA | |
| | | VMLENYKNLVSLGYQLTKPD | CGTTCAAGGATGTCTTTGTG | |
| | | VILRLEKGEEP | GACTTCACCCGGGAAGAATG | |
| | | (SEQ ID NO: 694) | GAAACTACTAGACACAGCAC | |
| | | | AACAAATAGTATACAGAAAC | |
| | | | GTAATGCTAGAAAACTACAA | |
| | | | AAACCTAGTAAGCCTAGGAT | |
| | | | ACCAACTAACAAAACCAGAC | |
| | | | GTAATACTAAGACTAGAAAA | |
| | | | AGGAGAAGAACCA | |
| | | | (SEQ ID NO: 1258) | |
| Proline; | 7 | DAKSLTAPPRTLVTFKDVFV | GACGCCAAGTCCCTTACGGC | 0.7537889 |
| 2; 7 | | DFTREEWKLLDTAQQIVYRN | TCCCCCTCGGACCCTGGTCA | |
| | | VMLENYKNLVSLGYQLTKPD | CTTTCAAGGATGTTTTCGTG | |
| | | VILRLEKGEEP | GATTTTACCAGGGAAGAATG | |
| | | (SEQ ID NO: 695) | GAAACTACTAGACACAGCAC | |
| | | | AACAAATAGTATACAGAAAC | |
| | | | GTAATGCTAGAAAACTACAA | |
| | | | AAACCTAGTAAGCCTAGGAT | |
| | | | ACCAACTAACAAAACCAGAC | |
| | | | GTAATACTAAGACTAGAAAA | |
| | | | AGGAGAAGAACCA | |
| | | | (SEQ ID NO: 1259) | |
| Proline; | 7 | DAKSLTAPPPTLVTFKDVFV | GATGCCAAGTCCCTTACTGC | 0.74610592 |
| 3; 7 | | DFTREEWKLLDTAQQIVYRN | TCCTCCCCCCACGCTGGTTA | |
| | | VMLENYKNLVSLGYQLTKPD | CCTTTAAGGACGTGTTCGTC | |
| | | VILRLEKGEEP | GATTTCACCAGGGAAGAATG | |
| | | (SEQ ID NO: 696) | GAAACTACTAGACACAGCAC | |
| | | | AACAAATAGTATACAGAAAC | |
| | | | GTAATGCTAGAAAACTACAA | |
| | | | AAACCTAGTAAGCCTAGGAT | |
| | | | ACCAACTAACAAAACCAGAC | |
| | | | GTAATACTAAGACTAGAAAA | |
| | | | AGGAGAAGAACCA | |
| | | | (SEQ ID NO: 1260) | |
| AsparticAcid; | 8 | DAKSLTAWDDTLVTFKDVFV | GATGCTAAGTCCCTGACGGC | 0.74252065 |
| 2; 8 | | DFTREEWKLLDTAQQIVYRN | CTGGGACGATACTTTGGTGA | |
| | | VMLENYKNLVSLGYQLTKPD | CCTTTAAGGACGTCTTCGTT | |
| | | VILRLEKGEEP | GATTTCACCAGGGAAGAATG | |
| | | (SEQ ID NO: 697) | GAAACTACTAGACACAGCAC | |
| | | | AACAAATAGTATACAGAAAC | |
| | | | GTAATGCTAGAAAACTACAA | |
| | | | AAACCTAGTAAGCCTAGGAT | |
| | | | ACCAACTAACAAAACCAGAC | |
| | | | GTAATACTAAGACTAGAAAA | |
| | | | AGGAGAAGAACCA | |
| | | | (SEQ ID NO: 1261) | |
| Asparagine; | 7 | DAKSLTANNNTLVTFKDVFV | GACGCTAAGTCCCTTACGGC | 0.72618378 |
| 3; 7 | | DFTREEWKLLDTAQQIVYRN | CAATAATAATACTCTGGTTA | |
| | | VMLENYKNLVSLGYQLTKPD | CCTTTAAGGATGTCTTCGTG | |
| | | VILRLEKGEEP | GATTTCACCAGGGAAGAATG | |
| | | (SEQ ID NO: 698) | GAAACTACTAGACACAGCAC | |
| | | | AACAAATAGTATACAGAAAC | |
| | | | GTAATGCTAGAAAACTACAA | |
| | | | AAACCTAGTAAGCCTAGGAT | |
| | | | ACCAACTAACAAAACCAGAC | |
| | | | GTAATACTAAGACTAGAAAA | |
| | | | AGGAGAAGAACCA | |
| | | | (SEQ ID NO: 1262) | |
| Methionine; | 7 | DAKSLTAMSRTLVTFKDVFV | GATGCCAAGTCTCTGACTGC | 0.71061025 |
| 1 | | DFTREEWKLLDTAQQIVYRN | TATGTCCAGGACCCTTGTCA | |
| | | VMLENYKNLVSLGYQLTKPD | CCTTCAAGGACGTGTTTGTT | |
| | | VILRLEKGEEP | GATTTCACGCGGGAAGAATG | |
| | | (SEQ ID NO: 699) | GAAACTACTAGACACAGCAC | |
| | | | AACAAATAGTATACAGAAAC | |
| | | | GTAATGCTAGAAAACTACAA | |
| | | | AAACCTAGTAAGCCTAGGAT | |
| | | | ACCAACTAACAAAACCAGAC | |
| | | | GTAATACTAAGACTAGAAAA | |
| | | | AGGAGAAGAACCA | |
| | | | (SEQ ID NO: 1263) | |
| Asparagine; | 8 | DAKSLTAWNNNLVTFKDVFV | GATGCCAAGTCCCTTACCGC | 0.70490419 |
| 3; 8 | | DFTREEWKLLDTAQQIVYRN | TTGGAATAATAATCTGGTGA | |
| | | VMLENYKNLVSLGYQLTKPD | CTTTCAAGGATGTTTTTGTC | |
| | | VILRLEKGEEP | GACTTCACCAGGGAAGAATG | |
| | | (SEQ ID NO: 700) | GAAACTACTAGACACAGCAC | |
| | | | AACAAATAGTATACAGAAAC | |
| | | | GTAATGCTAGAAAACTACAA | |
| | | | AAACCTAGTAAGCCTAGGAT | |
| | | | ACCAACTAACAAAACCAGAC | |
| | | | GTAATACTAAGACTAGAAAA | |
| | | | AGGAGAAGAACCA | |
| | | | (SEQ ID NO: 1264) | |
| Asparagine; | 9 | DAKSLTAWSNNLVTFKDVFV | GATGCTAAGTCCCTGACCGC | 0.7021223 |
| 2; 9 | | DFTREEWKLLDTAQQIVYRN | CTGGTCTAATAATTTGGTTA | |
| | | VMLENYKNLVSLGYQLTKPD | CCTTCAAGGATGTGTTTGTC | |
| | | VILRLEKGEEP | GACTTCACTAGGGAAGAATG | |
| | | (SEQ ID NO: 701) | GAAACTACTAGACACAGCAC | |
| | | | AACAAATAGTATACAGAAAC | |
| | | | GTAATGCTAGAAAACTACAA | |
| | | | AAACCTAGTAAGCCTAGGAT | |
| | | | ACCAACTAACAAAACCAGAC | |
| | | | GTAATACTAAGACTAGAAAA | |
| | | | AGGAGAAGAACCA | |
| | | | (SEQ ID NO: 1265) | |
| Proline; | 6 | DAKSLTPPSRTLVTFKDVFV | GACGCCAAGTCCCTTACGCC | 0.70094498 |
| 2; 6 | | DFTREEWKLLDTAQQIVYRN | CCCTTCTCGGACTCTGGTGA | |
| | | VMLENYKNLVSLGYQLTKPD | CCTTTAAGGATGTCTTCGTT | |
| | | VILRLEKGEEP | GATTTCACCAGGGAAGAATG | |
| | | (SEQ ID NO: 702) | GAAACTACTAGACACAGCAC | |
| | | | AACAAATAGTATACAGAAAC | |
| | | | GTAATGCTAGAAAACTACAA | |
| | | | AAACCTAGTAAGCCTAGGAT | |
| | | | ACCAACTAACAAAACCAGAC | |
| | | | GTAATACTAAGACTAGAAAA | |
| | | | AGGAGAAGAACCA | |
| | | | (SEQ ID NO: 1266) | |
| GlutamicAcid; | 6 | DAKSLTEEERTLVTFKDVFV | GACGCCAAGTCCCTGACGGA | 0.69641957 |
| 3; 6 | | DFTREEWKLLDTAQQĮVYRN | GGAGGAGCGGACTCTTGTGA | |
| | | VMLENYKNLVSLGYQLTKPD | CCTTTAAGGATGTTTTCGTC | |
| | | VILRLEKGEEP | GATTTCACCAGGGAAGAATG | |
| | | (SEQ ID NO: 703) | GAAACTACTAGACACAGCAC | |
| | | | AACAAATAGTATACAGAAAC | |
| | | | GTAATGCTAGAAAACTACAA | |
| | | | AAACCTAGTAAGCCTAGGAT | |
| | | | ACCAACTAACAAAACCAGAC | |
| | | | GTAATACTAAGACTAGAAAA | |
| | | | AGGAGAAGAACCA | |
| | | | (SEQ ID NO: 1267) | |
| Alanine; | 5 | DAKSLAAASRTLVTFKDVFV | GATGCTAAGTCTTTGGCCGC | 0.69263933 |
| 3; 5 | | DFTREEWKLLDTAQQIVYRN | GGCCTCCAGGACCCTTGTGA | |
| | | VMLENYKNLVSLGYQLTKPD | CTTTCAAGGACGTTTTTGTC | |
| | | VILRLEKGEEP | GATTTCACCCGGGAAGAATG | |
| | | (SEQ ID NO: 704) | GAAACTACTAGACACAGCAC | |
| | | | AACAAATAGTATACAGAAAC | |
| | | | GTAATGCTAGAAAACTACAA | |
| | | | AAACCTAGTAAGCCTAGGAT | |
| | | | ACCAACTAACAAAACCAGAC | |
| | | | GTAATACTAAGACTAGAAAA | |
| | | | AGGAGAAGAACCA | |
| | | | (SEQ ID NO: 1268) | |
| Glutamine; | 7 | DAKSLTAQQRTLVTFKDVFV | GATGCTAAGTCCCTGACCGC | 0.67752105 |
| 2; 7 | | DFTREEWKLLDTAQQIVYRN | CCAGCAGCGGACGCTTGTTA | |
| | | VMLENYKNLVSLGYQLTKPD | CTTTCAAGGATGTCTTTGTG | |
| | | VILRLEKGEEP | GACTTCACCAGGGAAGAATG | |
| | | (SEQ ID NO: 705) | GAAACTACTAGACACAGCAC | |
| | | | AACAAATAGTATACAGAAAC | |
| | | | GTAATGCTAGAAAACTACAA | |
| | | | AAACCTAGTAAGCCTAGGAT | |
| | | | ACCAACTAACAAAACCAGAC | |
| | | | GTAATACTAAGACTAGAAAA | |
| | | | AGGAGAAGAACCA | |
| | | | (SEQ ID NO: 1269) | |
| GlutamicAcid; | 9 | DAKSLTAWSEEEVTFKDVFV | GATGCCAAGTCCCTTACCGC | 0.66806615 |
| 3; 9 | | DFTREEWKLLDTAQQIVYRN | TTGGTCTGAGGAGGAGGTTA | |
| | | VMLENYKNIVSLGYQLTKPD | CTTTCAAGGATGTGTTTGTC | |
| | | VILRLEKGEEP | GACTTCACCAGGGAAGAATG | |
| | | (SEQ ID NO: 706) | GAAACTACTAGACACAGCAC | |
| | | | AACAAATAGTATACAGAAAC | |
| | | | GTAATGCTAGAAAACTACAA | |
| | | | AAACCTAGTAAGCCTAGGAT | |
| | | | ACCAACTAACAAAACCAGAC | |
| | | | GTAATACTAAGACTAGAAAA | |
| | | | AGGAGAAGAACCA | |
| | | | (SEQ ID NO: 1270) | |
| Glutamine; | 6 | DAKSLTQQSRTLVTFKDVFV | GATGCCAAGTCTCTGACTCA | 0.65472821 |
| 2; 5 | | DFTREEWKLLDTAQQIVYRN | GCAGTCCCGGACCCTTGTGA | |
| | | VMLENYKNLVSLGYQLTKPD | CGTTCAAGGACGTTTTCGTC | |
| | | VILRLEKGEEP | GATTTTACCAGGGAAGAATG | |
| | | (SEQ ID NO: 707) | GAAACTACTAGACACAGCAC | |
| | | | AACAAATAGTATACAGAAAC | |
| | | | GTAATGCTAGAAAACTACAA | |
| | | | AAACCTAGTAAGCCTAGGAT | |
| | | | ACCAACTAACAAAACCAGAC | |
| | | | GTAATACTAAGACTAGAAAA | |
| | | | AGGAGAAGAACCA | |
| | | | (SEQ ID NO: 1271) | |
| GlutamicAcid; | 39 | DAKSLTAWSRTLVTFKDVFV | GACGCTAAGTCCCTTACGGC | 0.65227203 |
| 1; 39 | | DFTREEWKLLDTAQQIVYRE | CTGGTCTAGGACCCTGGTCA | |
| | | VMLENYKNLVSLGYQLTKPD | CCTTTAAGGATGTTTTCGTG | |
| | | VILRLEKGEEP | GATTTCACTCGGGAAGAATG | |
| | | (SEQ ID NO: 708) | GAAACTACTAGACACAGCAC | |
| | | | AACAAATAGTATACAGAGAA | |
| | | | GTAATGCTAGAAAACTACAA | |
| | | | AAACCTAGTAAGCCTAGGAT | |
| | | | ACCAACTAACAAAACCAGAC | |
| | | | GTAATACTAAGACTAGAAAA | |
| | | | AGGAGAAGAACCA | |
| | | | (SEQ ID NO: 1272) | |
| Proline; | 10 | DAKSLTAWSRPLVTFKDVFV | GATGCCAAGTCTCTTACCGC | 0.64837531 |
| 1; 10 | | DFTREEWKLLDTAQQIVYRN | TTGGTCCAGGCCCCTGGTGA | |
| | | VMLENYKNLVSLGYQLTKPD | CTTTCAAGGATGTCTTTGTT | |
| | | VILRLEKGEEP | GACTTCACCCGGGAAGAATG | |
| | | (SEQ ID NO: 709) | GAAACTACTAGACACAGCAC | |
| | | | AACAAATAGTATACAGAAAC | |
| | | | GTAATGCTAGAAAACTACAA | |
| | | | AAACCTAGTAAGCCTAGGAT | |
| | | | ACCAACTAACAAAACCAGAC | |
| | | | GTAATACTAAGACTAGAAAA | |
| | | | AGGAGAAGAACCA | |
| | | | (SEQ ID NO: 1273) | |
| Threonine; | 4 | DAKSTTAWSRTLVTFKDVFV | GACGCTAAGTCCACCACCGC | 0.64360588 |
| 1; 4 | | DFTREEWKLLDTAQQIVYRN | CTGGTCTAGGACTCTTGTTA | |
| | | VMLENYKNIVSLGYQLTKPD | CGTTCAAGGATGTGTTTGTC | |
| | | VILRLEKGEEP | GATTTCACTCGGGAAGAATG | |
| | | (SEQ ID NO: 710) | GAAACTACTAGACACAGCAC | |
| | | | AACAAATAGTATACAGAAAC | |
| | | | GTAATGCTAGAAAACTACAA | |
| | | | AAACCTAGTAAGCCTAGGAT | |
| | | | ACCAACTAACAAAACCAGAC | |
| | | | GTAATACTAAGACTAGAAAA | |
| | | | AGGAGAAGAACCA | |
| | | | (SEQ ID NO: 1274) | |
| Asparagine; | 9 | DAKSLTAWSNNNVTFKDVFV | GACGCCAAGTCTCTTACCGC | 0.63949165 |
| 3; 9 | | DFTREEWKLLDTAQQIVYRN | TTGGTCCAATAATAATGTTA | |
| | | VMLENYKNLVSLGYQLTKPD | CTTTCAAGGATGTGTTTGTC | |
| | | VILRLEKGEEP | GATTTCACCAGGGAAGAATG | |
| | | (SEQ ID NO: 711) | GAAACTACTAGACACAGCAC | |
| | | | AACAAATAGTATACAGAAAC | |
| | | | GTAATGCTAGAAAACTACAA | |
| | | | AAACCTAGTAAGCCTAGGAT | |
| | | | ACCAACTAACAAAACCAGAC | |
| | | | GTAATACTAAGACTAGAAAA | |
| | | | AGGAGAAGAACCA | |
| | | | (SEQ ID NO: 1275) | |
| AsparticAcid; | 8 | DAKSLTAWDDDLVTFKDVFV | GATGCTAAGTCCCTTACTGC | 0.63564982 |
| 3; 8 | | DFTREEWKLLDTAQQIVYRN | CTGGGACGATGATCTGGTCA | |
| | | VMLENYKNLVSLGYQLTKPD | CCTTCAAGGACGTTTTTGTG | |
| | | VILRLEKGEEP | GATTTCACCAGGGAAGAATG | |
| | | (SEQ ID NO: 712) | GAAACTACTAGACACAGCAC | |
| | | | AACAAATAGTATACAGAAAC | |
| | | | GTAATGCTAGAAAACTACAA | |
| | | | AAACCTAGTAAGCCTAGGAT | |
| | | | ACCAACTAACAAAACCAGAC | |
| | | | GTAATACTAAGACTAGAAAA | |
| | | | AGGAGAAGAACCA | |
| | | | (SEQ ID NO: 1276) | |
| Alanine; | 6 | DAKSLTAASRTLVTFKDVFV | GATGCTAAGTCCCTTACTGC | 0.63459967 |
| 2; 6 | | DFTREEWKLLDTAQQIVYRN | CGCCTCTCGGACGCTGGTGA | |
| | | VMLENYKNLVSLGYQLTKPD | CCTTCAAGGACGTTTTCGTC | |
| | | VILRLEKGEEP | GATTTTACCAGGGAAGAATG | |
| | | (SEQ ID NO: 713) | GAAACTACTAGACACAGCAC | |
| | | | AACAAATAGTATACAGAAAC | |
| | | | GTAATGCTAGAAAACTACAA | |
| | | | AAACCTAGTAAGCCTAGGAT | |
| | | | ACCAACTAACAAAACCAGAC | |
| | | | GTAATACTAAGACTAGAAAA | |
| | | | AGGAGAAGAACCA | |
| | | | (SEQ ID NO: 1277) | |
| Glycine; | 7 | DAKSLTAGSRTLVTFKDVFV | GACGCCAAGTCTTTGACGGC | 0.6338712 |
| 1; 7 | | DFTREEWKLLDTAQQIVYRN | TGGCTCCCGGACCCTTGTGA | |
| | | VMLENYKNLVSLGYQLTKPD | CTTTCAAGGATGTCTTCGTT | |
| | | VILRLEKGEEP | GATTTTACCAGGGAAGAATG | |
| | | (SEQ ID NO: 714) | GAAACTACTAGACACAGCAC | |
| | | | AACAAATAGTATACAGAAAC | |
| | | | GTAATGCTAGAAAACTACAA | |
| | | | AAACCTAGTAAGCCTAGGAT | |
| | | | ACCAACTAACAAAACCAGAC | |
| | | | GTAATACTAAGACTAGAAAA | |
| | | | AGGAGAAGAACCA | |
| | | | (SEQ ID NO: 1278) | |
| Serine; | 7 | DAKSLTASSRTLVTFKDVFV | GACGCTAAGAGTCTGACTGC | 0.6299573 |
| 1; 7 | | DFTREEWKLLDTAQQIVYRN | CTCTTCCCGGACCCTTGTCA | |
| | | VMLENYKNLVSLGYQLTKPD | CGTTCAAGGATGTTTTCGTG | |
| | | VILRLEKGEEP | GATTTTACCAGGGAAGAATG | |
| | | (SEQ ID NO: 715) | GAAACTACTAGACACAGCAC | |
| | | | AACAAATAGTATACAGAAAC | |
| | | | GTAATGCTAGAAAACTACAA | |
| | | | AAACCTAGTAAGCCTAGGAT | |
| | | | ACCAACTAACAAAACCAGAC | |
| | | | GTAATACTAAGACTAGAAAA | |
| | | | AGGAGAAGAACCA | |
| | | | (SEQ ID NO: 1279) | |
| Serine; | 6 | DAKSLTSSSRTLVTFKDVFV | GATGCCAAGTCCCTGACGTC | 0.61708486 |
| 2; 6 | | DFTREEWKLLDTAQQIVYRN | TAGTTCAAGGACTCTTGTGA | |
| | | VMLENYKNLVSLGYQLTKPD | CCTTTAAGGACGTCTTCGTT | |
| | | VILRLEKGEEP | GATTTCACCCGGGAAGAATG | |
| | | (SEQ ID NO: 716) | GAAACTACTAGACACAGCAC | |
| | | | AACAAATAGTATACAGAAAC | |
| | | | GTAATGCTAGAAAACTACAA | |
| | | | AAACCTAGTAAGCCTAGGAT | |
| | | | ACCAACTAACAAAACCAGAC | |
| | | | GTAATACTAAGACTAGAAAA | |
| | | | AGGAGAAGAACCA | |
| | | | (SEQ ID NO: 1280) | |
| AsparticAcid; | 3 | DAKDDTAWSRTLVTFKDVFV | GATGCTAAGGATGACACTGC | 0.61493283 |
| 2; 3 | | DFTREEWKLLDTAQQIVYRN | CTGGTCCCGGACGCTTGTGA | |
| | | VMLENYKNLVSLGYQLTKPD | CCTTTAAGGATGTCTTCGTT | |
| | | VILRLEKGEEP | GACTTCACCAGGGAAGAATG | |
| | | (SEQ ID NO: 717) | GAAACTACTAGACACAGCAC | |
| | | | AACAAATAGTATACAGAAAC | |
| | | | GTAATGCTAGAAAACTACAA | |
| | | | AAACCTAGTAAGCCTAGGAT | |
| | | | ACCAACTAACAAAACCAGAC | |
| | | | GTAATACTAAGACTAGAAAA | |
| | | | AGGAGAAGAACCA | |
| | | | (SEQ ID NO: 1281) | |
| Histidine; | 55 | DAKSLTAWSRTLVTFKDVFV | GATGCCAAGTCTCTGACCGC | 0.59443523 |
| 1; 55 | | DFTREEWKLLDTAQQIVYRN | TTGGTCCAGGACGCTTGTGA | |
| | | VMLENYKNIVSLGYQHTKPD | CTTTCAAGGATGTCTTCGTT | |
| | | VILRLEKGEEP | GACTTTACCCGGGAAGAATG | |
| | | (SEQ ID NO: 718) | GAAACTACTAGACACAGCAC | |
| | | | AACAAATAGTATACAGAAAC | |
| | | | GTAATGCTAGAAAACTACAA | |
| | | | AAACCTAGTAAGCCTAGGAT | |
| | | | ACCAACACACAAAACCAGAC | |
| | | | GTAATACTAAGACTAGAAAA | |
| | | | AGGAGAAGAACCA | |
| | | | (SEQ ID NO: 1282) | |
| Lysine; | 6 | DAKSLTKKSRTLVTFKDVFV | GATGCCAAGTCCCTTACCAA | 0.59389075 |
| 2; 6 | | DFTREEWKLLDTAQQIVYRN | GAAGTCTAGGACTCTGGTTA | |
| | | VMLENYKNLVSLGYQLTKPD | CCTTCAAGGACGTCTTTGTG | |
| | | VILRLEKGEEP | GATTTCACGCGGGAAGAATG | |
| | | (SEQ ID NO: 719) | GAAACTACTAGACACAGCAC | |
| | | | AACAAATAGTATACAGAAAC | |
| | | | GTAATGCTAGAAAACTACAA | |
| | | | AAACCTAGTAAGCCTAGGAT | |
| | | | ACCAACTAACAAAACCAGAC | |
| | | | GTAATACTAAGACTAGAAAA | |
| | | | AGGAGAAGAACCA | |
| | | | (SEQ ID NO: 1283) | |
| GlutamicAcid; | 9 | DAKSLTAWSEELVTFKDVFV | GATGCCAAGTCCCTTACTGC | 0.58357862 |
| 2; 9 | | DFTREEWKLLDTAQQIVYRN | TTGGTCTGAGGAGCTGGTGA | |
| | | VMLENYKNLVSLGYQLTKPD | CCTTCAAGGATGTCTTTGTT | |
| | | VILRLEKGEEP | GACTTCACCAGGGAAGAATG | |
| | | (SEQ ID NO: 720) | GAAACTACTAGACACAGCAC | |
| | | | AACAAATAGTATACAGAAAC | |
| | | | GTAATGCTAGAAAACTACAA | |
| | | | AAACCTAGTAAGCCTAGGAT | |
| | | | ACCAACTAACAAAACCAGAC | |
| | | | GTAATACTAAGACTAGAAAA | |
| | | | AGGAGAAGAACCA | |
| | | | (SEQ ID NO: 1284) | |
| Glutamine; | 8 | DAKSLTAWQQQLVTFKDVFV | GATGCCAAGTCCCTTACCGC | 0.58274443 |
| 3; 8 | | DFTREEWKLLDTAQQIVYRN | TTGGCAGCAGCAGCTGGTCA | |
| | | VMLENYKNLVSLGYQLTKPD | CTTTCAAGGACGTGTTCGTT | |
| | | VILRLEKGEEP | GATTTTACCAGGGAAGAATG | |
| | | (SEQ ID NO: 721) | GAAACTACTAGACACAGCAC | |
| | | | AACAAATAGTATACAGAAAC | |
| | | | GTAATGCTAGAAAACTACAA | |
| | | | AAACCTAGTAAGCCTAGGAT | |
| | | | ACCAACTAACAAAACCAGAC | |
| | | | GTAATACTAAGACTAGAAAA | |
| | | | AGGAGAAGAACCA | |
| | | | (SEQ ID NO: 1285) | |
| Threonine; | 11 | DAKSLTAWSRTTVTFKDVFV | GATGCCAAGTCCCTTACGGC | 0.57209112 |
| 1; 11 | | DFTREEWKLLDTAQQUIVYR | TTGGTCTAGGACCACCGTGA | |
| | | NVMLENYKNLVSLGYQLTKP | CTTTCAAGGACGTTTTCGTC | |
| | | DVILRLEKGEEP | GATTTTACTCGGGAAGAATG | |
| | | (SEQ ID NO: 722) | GAAACTACTAGACACAGCAC | |
| | | | AACAAATAGTATACAGAAAC | |
| | | | GTAATGCTAGAAAACTACAA | |
| | | | AAACCTAGTAAGCCTAGGAT | |
| | | | ACCAACTAACAAAACCAGAC | |
| | | | GTAATACTAAGACTAGAAAA | |
| | | | AGGAGAAGAACCA | |
| | | | (SEQ ID NO: 1286) | |
| Asparagine; | 7 | DAKSLTANSRTLVTFKDVFV | GATGCCAAGTCTCTTACCGC | 0.57143202 |
| 1; 7 | | DFTREEWKLLDTAQQIVYRN | TAATTCCAGGACGCTGGTCA | |
| | | VMLENYKNLVSLGYQLTKPD | CCTTCAAGGATGTTTTTGTG | |
| | | VILRLEKGEEP | GACTTCACTCGGGAAGAATG | |
| | | (SEQ ID NO: 723) | GAAACTACTAGACACAGCAC | |
| | | | AACAAATAGTATACAGAAAC | |
| | | | GTAATGCTAGAAAACTACAA | |
| | | | AAACCTAGTAAGCCTAGGAT | |
| | | | ACCAACTAACAAAACCAGAC | |
| | | | GTAATACTAAGACTAGAAAA | |
| | | | AGGAGAAGAACCA | |
| | | | (SEQ ID NO: 1287) | |
| Glutamine; | 5 | DAKSLQQQSRTLVTFKDVFV | GACGCCAAGTCTCTGCAGCA | 0.57133084 |
| 3; 5 | | DFTREEWKLLDTAQQIVYRN | GCAGTCCCGGACTCTTGTTA | |
| | | VMLENYKNIVSLGYQLTKPD | CCTTCAAGGATGTGTTTGTC | |
| | | VILRLEKGEEP | GATTTCACCAGGGAAGAATG | |
| | | (SEQ ID NO: 724) | GAAACTACTAGACACAGCAC | |
| | | | AACAAATAGTATACAGAAAC | |
| | | | GTAATGCTAGAAAACTACAA | |
| | | | AAACCTAGTAAGCCTAGGAT | |
| | | | ACCAACTAACAAAACCAGAC | |
| | | | GTAATACTAAGACTAGAAAA | |
| | | | AGGAGAAGAACCA | |
| | | | (SEQ ID NO: 1288) | |
| Proline; | 8 | DAKSLTAWPPTLVTFKDVFV | GATGCTAAGTCCCTTACCGC | 0.56714292 |
| 2; 8 | | DFTREEWKLLDTAQQIVYRN | CTGGCCTCCCACCCTGGTTA | |
| | | VMLENYKNLVSLGYQLTKPD | CTTTTAAGGATGTGTTCGTC | |
| | | VILRLEKGEEP | GACTTCACGAGGGAAGAATG | |
| | | (SEQ ID NO: 725) | GAAACTACTAGACACAGCAC | |
| | | | AACAAATAGTATACAGAAAC | |
| | | | GTAATGCTAGAAAACTACAA | |
| | | | AAACCTAGTAAGCCTAGGAT | |
| | | | ACCAACTAACAAAACCAGAC | |
| | | | GTAATACTAAGACTAGAAAA | |
| | | | AGGAGAAGAACCA | |
| | | | (SEQ ID NO: 1289) | |
| GlutamicAcid; | 3 | DAKEEEAWSRTLVTFKDVFV | GACGCTAAGGAGGAGGAGGC | 0.55531398 |
| 3; 3 | | DFTREEWKLLDTAQQIVYRN | CTGGTCCAGGACCCTTGTTA | |
| | | VMLENYKNLVSLGYQLTKPD | CCTTTAAGGATGTGTTCGTC | |
| | | VILRLEKGEEP | GATTTCACTCGGGAAGAATG | |
| | | (SEQ ID NO: 726) | GAAACTACTAGACACAGCAC | |
| | | | AACAAATAGTATACAGAAAC | |
| | | | GTAATGCTAGAAAACTACAA | |
| | | | AAACCTAGTAAGCCTAGGAT | |
| | | | ACCAACTAACAAAACCAGAC | |
| | | | GTAATACTAAGACTAGAAAA | |
| | | | AGGAGAAGAACCA | |
| | | | (SEQ ID NO: 1290) | |
| Asparagine; | 6 | DAKSLTNNSRTLVTFKDVFV | GATGCCAAGTCCCTGACCAA | 0.55430182 |
| 2; 6 | | DFTREEWKLLDTAQQIVYRN | TAATTCTCGGACCCTTGTCA | |
| | | VMLENYKNLVSLGYQLTKPD | CTTTTAAGGACGTGTTCGTT | |
| | | VILRLEKGEEP | GATTTCACGAGGGAAGAATG | |
| | | (SEQ ID NO: 727) | GAAACTACTAGACACAGCAC | |
| | | | AACAAATAGTATACAGAAAC | |
| | | | GTAATGCTAGAAAACTACAA | |
| | | | AAACCTAGTAAGCCTAGGAT | |
| | | | ACCAACTAACAAAACCAGAC | |
| | | | GTAATACTAAGACTAGAAAA | |
| | | | AGGAGAAGAACCA | |
| | | | (SEQ ID NO: 1291) | |
| AsparticAcid; | 11 | DAKSLTAWSRTDVTFKDVFV | GATGCTAAGTCTCTTACGGC | 0.55416963 |
| 1; 11 | | DFTREEWKLLDTAQQIVYRN | CTGGTCCAGGACCGATGTGA | |
| | | VMLENYKNLVSLGYQLTKPD | CTTTCAAGGACGTTTTCGTC | |
| | | VILRLEKGEEP | GATTTTACCCGGGAAGAATG | |
| | | (SEQ ID NO: 728) | GAAACTACTAGACACAGCAC | |
| | | | AACAAATAGTATACAGAAAC | |
| | | | GTAATGCTAGAAAACTACAA | |
| | | | AAACCTAGTAAGCCTAGGAT | |
| | | | ACCAACTAACAAAACCAGAC | |
| | | | GTAATACTAAGACTAGAAAA | |
| | | | AGGAGAAGAACCA | |
| | | | (SEQ ID NO: 1292) | |
| Threonine; | 7 | DAKSLTATTTTLVTFKDVFV | GACGCCAAGTCCCTTACTGC | 0.54915125 |
| 3; 7 | | DFTREEWKLLDTAQQIVYRN | TACTACCACCACGCTGGTTA | |
| | | VMLENYKNLVSLGYQLTKPD | CCTTTAAGGATGTCTTCGTG | |
| | | VILRLEKGEEP | GATTTCACAAGGGAAGAATG | |
| | | (SEQ ID NO: 729) | GAAACTACTAGACACAGCAC | |
| | | | AACAAATAGTATACAGAAAC | |
| | | | GTAATGCTAGAAAACTACAA | |
| | | | AAACCTAGTAAGCCTAGGAT | |
| | | | ACCAACTAACAAAACCAGAC | |
| | | | GTAATACTAAGACTAGAAAA | |
| | | | AGGAGAAGAACCA | |
| | | | (SEQ ID NO: 1293) | |
| AsparticAcid; | 9 | DAKSLTAWSDDLVTFKDVFV | GATGCCAAGTCCCTTACCGC | 0.54802537 |
| 2; 9 | | DFTREEWKLLDTAQQIVYRN | TTGGTCTGATGACCTGGTTA | |
| | | VMLENYKNIVSLGYQLTKPD | CCTTCAAGGACGTCTTCGTG | |
| | | VILRLEKGEEP | GATTTTACTAGGGAAGAATG | |
| | | (SEQ ID NO: 730) | GAAACTACTAGACACAGCAC | |
| | | | AACAAATAGTATACAGAAAC | |
| | | | GTAATGCTAGAAAACTACAA | |
| | | | AAACCTAGTAAGCCTAGGAT | |
| | | | ACCAACTAACAAAACCAGAC | |
| | | | GTAATACTAAGACTAGAAAA | |
| | | | AGGAGAAGAACCA | |
| | | | (SEQ ID NO: 1294) | |
| Lysine; | 7 | DAKSLTAKSRTLVTFKDVFV | GATGCTAAGTCCCTCACCGC | 0.54460274 |
| 1; 7 | | DFTREEWKLLDTAQQIVYRN | CAAGTCTAGGACCTTGGTCA | |
| | | VMLENYKNLVSLGYQLTKPD | CGTTCAAGGACGTTTTCGTG | |
| | | VILRLEKGEEP | GATTTTACTCGGGAAGAATG | |
| | | (SEQ ID NO: 731) | GAAACTACTAGACACAGCAC | |
| | | | AACAAATAGTATACAGAAAC | |
| | | | GTAATGCTAGAAAACTACAA | |
| | | | AAACCTAGTAAGCCTAGGAT | |
| | | | ACCAACTAACAAAACCAGAC | |
| | | | GTAATACTAAGACTAGAAAA | |
| | | | AGGAGAAGAACCA | |
| | | | (SEQ ID NO: 1295) | |
| GlutamicAcid; | 15 | DAKSLTAWSRTLVTFEDVFV | GATGCCAAGTCTCTGACCGC | 0.54206866 |
| 1; 15 | | DFTREEWKLLDTAQQIVYRN | TTGGTCCCGGACCCTTGTCA | |
| | | VMLENYKNLVSLGYQLTKPD | CGTTCGAGGATGTTTTCGTG | |
| | | VILRLEKGEEP | GACTTTACTAGGGAAGAATG | |
| | | (SEQ ID NO: 732) | GAAACTACTAGACACAGCAC | |
| | | | AACAAATAGTATACAGAAAC | |
| | | | GTAATGCTAGAAAACTACAA | |
| | | | AAACCTAGTAAGCCTAGGAT | |
| | | | ACCAACTAACAAAACCAGAC | |
| | | | GTAATACTAAGACTAGAAAA | |
| | | | AGGAGAAGAACCA | |
| | | | (SEQ ID NO: 1296) | |
| AsparticAcid; | 15 | DAKSLTAWSRTLVTFDDVFV | GATGCCAAGTCCCTGACTGC | 0.526979 |
| 2; 15 | | DFTREEWKLLDTAQQIVYRN | TTGGTCTAGGACCCTTGTGA | |
| | | VMLENYKNLVSLGYQLTKPD | CCTTTGATGATGTTTTCGTC | |
| | | VILRLEKGEEP | GACTTCACGCGGGAAGAATG | |
| | | (SEQ ID NO: 733) | GAAACTACTAGACACAGCAC | |
| | | | AACAAATAGTATACAGAAAC | |
| | | | GTAATGCTAGAAAACTACAA | |
| | | | AAACCTAGTAAGCCTAGGAT | |
| | | | ACCAACTAACAAAACCAGAC | |
| | | | GTAATACTAAGACTAGAAAA | |
| | | | AGGAGAAGAACCA | |
| | | | (SEQ ID NO: 1297) | |
| AsparticAcid; | 15 | DAKSLTAWSRTLVTFDDVFV | GACGCTAAGTCCCTTACCGC | 0.52579234 |
| 1; 15 | | DFTREEWKLLDTAQQIVYRN | CTGGTCTCGGACGCTGGTGA | |
| | | VMLENYKNLVSLGYQLTKPD | CCTTTGATGATGTCTTCGTT | |
| | | VILRLEKGEEP | GATTTCACTAGGGAAGAATG | |
| | | (SEQ ID NO: 734) | GAAACTACTAGACACAGCAC | |
| | | | AACAAATAGTATACAGAAAC | |
| | | | GTAATGCTAGAAAACTACAA | |
| | | | AAACCTAGTAAGCCTAGGAT | |
| | | | ACCAACTAACAAAACCAGAC | |
| | | | GTAATACTAAGACTAGAAAA | |
| | | | AGGAGAAGAACCA | |
| | | | (SEQ ID NO: 1298) | |
| Glutamine; | 9 | DAKSLTAWSQQQVTFKDVFV | GACGCTAAGTCCCTTACCGC | 0.52493949 |
| 3; 9 | | DFTREEWKLLDTAQQIVYRN | CTGGTCTCAGCAGCAGGTTA | |
| | | VMLENYKNLVSLGYQLTKPD | CTTTCAAGGATGTCTTTGTG | |
| | | VILRLEKGEEP | GATTTCACCAGGGAAGAATG | |
| | | (SEQ ID NO: 735) | GAAACTACTAGACACAGCAC | |
| | | | AACAAATAGTATACAGAAAC | |
| | | | GTAATGCTAGAAAACTACAA | |
| | | | AAACCTAGTAAGCCTAGGAT | |
| | | | ACCAACTAACAAAACCAGAC | |
| | | | GTAATACTAAGACTAGAAAA | |
| | | | AGGAGAAGAACCA | |
| | | | (SEQ ID NO: 1299) | |
| GlutamicAcid; | 50 | DAKSLTAWSRTLVTFKDVFV | GATGCTAAGAGCCTTACCGC | 0.52368253 |
| 1; 50 | | DFTREEWKLLDTAQQIVYRN | CTGGTCCCGGACCCTGGTGA | |
| | | VMLENYKNIVELGYQLTKPD | CTTTCAAGGACGTCTTCGTT | |
| | | VILRLEKGEEP | GATTTTACGAGGGAAGAATG | |
| | | (SEQ ID NO: 736) | GAAACTACTAGACACAGCAC | |
| | | | AACAAATAGTATACAGAAAC | |
| | | | GTAATGCTAGAAAACTACAA | |
| | | | AAACCTAGTAGAACTAGGAT | |
| | | | ACCAACTAACAAAACCAGAC | |
| | | | GTAATACTAAGACTAGAAAA | |
| | | | AGGAGAAGAACCA | |
| | | | (SEQ ID NO: 1300) | |
| GlutamicAcid; | 8 | DAKSLTAWEEELVTFKDVFV | GACGCCAAGTCCCTTACCGC | 0.51955266 |
| 3; 8 | | DFTREEWKLLDTAQQIVYRN | TTGGGAGGAGGAGCTGGTCA | |
| | | VMLENYKNLVSLGYQLTKPD | CTTTCAAGGATGTTTTTGTG | |
| | | VILRLEKGEEP | GATTTCACCAGGGAAGAATG | |
| | | (SEQ ID NO: 737) | GAAACTACTAGACACAGCAC | |
| | | | AACAAATAGTATACAGAAAC | |
| | | | GTAATGCTAGAAAACTACAA | |
| | | | AAACCTAGTAAGCCTAGGAT | |
| | | | ACCAACTAACAAAACCAGAC | |
| | | | GTAATACTAAGACTAGAAAA | |
| | | | AGGAGAAGAACCA | |
| | | | (SEQ ID NO: 1301) | |
| GlutamicAcid; | 35 | DAKSLTAWSRTLVTFKDVFV | GATGCTAAGTCCCTGACCGC | 0.5179103 |
| 1; 35 | | DFTREEWKLLDTAQQEVYRN | CTGGTCTCGGACCCTTGTGA | |
| | | VMLENYKNLVSLGYQLTKPD | CGTTCAAGGACGTCTTTGTT | |
| | | VILRLEKGEEP | GATTTCACTAGGGAAGAATG | |
| | | (SEQ ID NO: 738) | GAAACTACTAGACACAGCAC | |
| | | | AACAAGAAGTATACAGAAAC | |
| | | | GTAATGCTAGAAAACTACAA | |
| | | | AAACCTAGTAAGCCTAGGAT | |
| | | | ACCAACTAACAAAACCAGAC | |
| | | | GTAATACTAAGACTAGAAAA | |
| | | | AGGAGAAGAACCA | |
| | | | (SEQ ID NO: 1302) | |
| Proline; | 11 | DAKSLTAWSRTPVTFKDVFV | GATGCCAAGTCTCTTACGGC | 0.51721922 |
| 1; 11 | | DFTREEWKLLDTAQQIVYRN | TTGGTCCCGGACCCCCGTTA | |
| | | VMLENYKNLVSLGYQLTKPD | CCTTTAAGGACGTCTTCGTG | |
| | | VILRLEKGEEP | GATTTCACTAGGGAAGAATG | |
| | | (SEQ ID NO: 739) | GAAACTACTAGACACAGCAC | |
| | | | AACAAATAGTATACAGAAAC | |
| | | | GTAATGCTAGAAAACTACAA | |
| | | | AAACCTAGTAAGCCTAGGAT | |
| | | | ACCAACTAACAAAACCAGAC | |
| | | | GTAATACTAAGACTAGAAAA | |
| | | | AGGAGAAGAACCA | |
| | | | (SEQ ID NO: 1303) | |
| GlutamicAcid; | 54 | DAKSLTAWSRTLVTFKDVFV | GACGCCAAGTCCCTTACGGC | 0.51510696 |
| 3; 54 | | DFTREEWKLLDTAQQIVYRN | TTGGTCTCGGACTCTGGTCA | |
| | | VMLENYKNLVSLGYEEEKPD | CCTTTAAGGATGTGTTCGTT | |
| | | VILRLEKGEEP | GATTTCACCAGGGAAGAATG | |
| | | (SEQ ID NO: 740) | GAAACTACTAGACACAGCAC | |
| | | | AACAAATAGTATACAGAAAC | |
| | | | GTAATGCTAGAAAACTACAA | |
| | | | AAACCTAGTAAGCCTAGGAT | |
| | | | ACGAAGAAGAAAAACCAGAC | |
| | | | GTAATACTAAGACTAGAAAA | |
| | | | AGGAGAAGAACCA | |
| | | | (SEQ ID NO: 1304) | |
| AsparticAcid; | 35 | DAKSLTAWSRTLVTFKDVFV | GATGCTAAGTCCCTGACTGC | 0.51046316 |
| 2; 35 | | DFTREEWKLLDTAQQDDYRN | CTGGTCTAGGACCCTTGTCA | |
| | | VMLENYKNLVSLGYQLTKPD | CCTTTAAGGATGTGTTCGTT | |
| | | VILRLEKGEEP | GATTTCACGCGGGAAGAATG | |
| | | (SEQ ID NO: 741) | GAAACTACTAGACACAGCAC | |
| | | | AACAAGACGACTACAGAAAC | |
| | | | GTAATGCTAGAAAACTACAA | |
| | | | AAACCTAGTAAGCCTAGGAT | |
| | | | ACCAACTAACAAAACCAGAC | |
| | | | GTAATACTAAGACTAGAAAA | |
| | | | AGGAGAAGAACCA | |
| | | | (SEQ ID NO: 1305) | |
| Alanine; | 6 | DAKSLTAAARTLVTFKDVFV | GACGCGAAGTCCCTGACGGC | 0.50902755 |
| 3; 6 | | DFTREEWKLLDTAQQIVYRN | CGCTGCCCGGACTCTTGTTA | |
| | | VMLENYKNLVSLGYQLTKPD | CCTTCAAGGATGTGTTCGTC | |
| | | VILRLEKGEEP | GATTTTACCAGGGAAGAATG | |
| | | (SEQ ID NO: 742) | GAAACTACTAGACACAGCAC | |
| | | | AACAAATAGTATACAGAAAC | |
| | | | GTAATGCTAGAAAACTACAA | |
| | | | AAACCTAGTAAGCCTAGGAT | |
| | | | ACCAACTAACAAAACCAGAC | |
| | | | GTAATACTAAGACTAGAAAA | |
| | | | AGGAGAAGAACCA | |
| | | | (SEQ ID NO: 1306) | |
| Glutamine; | 7 | DAKSLTAQSRTLVTFKDVFV | GATGCTAAGTCCCTTACGGC | 0.50677669 |
| 1; 7 | | DFTREEWKLLDTAQQIVYRN | CCAGTCTCGGACTCTGGTTA | |
| | | VMLENYKNLVSLGYQLTKPD | CCTTCAAGGATGTCTTCGTG | |
| | | VILRLEKGEEP | GACTTTACCAGGGAAGAATG | |
| | | (SEQ ID NO: 743) | GAAACTACTAGACACAGCAC | |
| | | | AACAAATAGTATACAGAAAC | |
| | | | GTAATGCTAGAAAACTACAA | |
| | | | AAACCTAGTAAGCCTAGGAT | |
| | | | ACCAACTAACAAAACCAGAC | |
| | | | GTAATACTAAGACTAGAAAA | |
| | | | AGGAGAAGAACCA | |
| | | | (SEQ ID NO: 1307) | |
| Alanine; | 7 | DAKSLTAAAATLVTFKDVFV | GATGCTAAGTCCCTCACGGC | 0.50591148 |
| 3; 7 | | DFTREEWKLLDTAQQIVYRN | GGCCGCTGCCACCCTTGTCA | |
| | | VMLENYKNLVSLGYQLTKPD | CCTTCAAGGACGTTTTCGTG | |
| | | VILRLEKGEEP | GATTTTACTAGGGAAGAATG | |
| | | (SEQ ID NO: 744) | GAAACTACTAGACACAGCAC | |
| | | | AACAAATAGTATACAGAAAC | |
| | | | GTAATGCTAGAAAACTACAA | |
| | | | AAACCTAGTAAGCCTAGGAT | |
| | | | ACCAACTAACAAAACCAGAC | |
| | | | GTAATACTAAGACTAGAAAA | |
| | | | AGGAGAAGAACCA | |
| | | | (SEQ ID NO: 1308) | |
| Lysine; | 5 | DAKSLKKWSRTLVTFKDVFV | GATGCCAAGTCCCTGAAGAA | 0.50454904 |
| 2; 5 | | DFTREEWKLLDTAQQIVYRN | GTGGTCTCGGACCCTTGTGA | |
| | | VMLENYKNLVSLGYQLTKPD | CTTTTAAGGATGTTTTCGTC | |
| | | VILRLEKGEEP | GACTTCACCAGGGAAGAATG | |
| | | (SEQ ID NO: 745) | GAAACTACTAGACACAGCAC | |
| | | | AACAAATAGTATACAGAAAC | |
| | | | GTAATGCTAGAAAACTACAA | |
| | | | AAACCTAGTAAGCCTAGGAT | |
| | | | ACCAACTAACAAAACCAGAC | |
| | | | GTAATACTAAGACTAGAAAA | |
| | | | AGGAGAAGAACCA | |
| | | | (SEQ ID NO: 1309) | |
| Glycine; | 7 | DAKSLTAGGGTLVTFKDVFV | GATGCTAAGTCCCTGACGGC | 0.49495873 |
| 3; 7 | | DFTREEWKLLDTAQQIVYRN | CGGGGGTGGCACCCTTGTTA | |
| | | VMLENYKNLVSLGYQLTKPD | CCTTCAAGGACGTCTTTGTG | |
| | | VILRLEKGEEP | GATTTCACTAGGGAAGAATG | |
| | | (SEQ ID NO: 746) | GAAACTACTAGACACAGCAC | |
| | | | AACAAATAGTATACAGAAAC | |
| | | | GTAATGCTAGAAAACTACAA | |
| | | | AAACCTAGTAAGCCTAGGAT | |
| | | | ACCAACTAACAAAACCAGAC | |
| | | | GTAATACTAAGACTAGAAAA | |
| | | | AGGAGAAGAACCA | |
| | | | (SEQ ID NO: 1310) | |
| AsparticAcid; | 0 | DDDSLTAWSRTLVTFKDVFV | GATGATGATTCTCTGACGGC | 0.48978651 |
| 3; 0 | | DFTREEWKLLDTAQQIVYRN | CTGGTCCCGGACTCTTGTCA | |
| | | VMLENYKNLVSLGYQLTKPD | CCTTTAAGGACGTTTTCGTG | |
| | | VILRLEKGEEP | GACTTCACCAGGGAAGAATG | |
| | | (SEQ ID NO: 747) | GAAACTACTAGACACAGCAC | |
| | | | AACAAATAGTATACAGAAAC | |
| | | | GTAATGCTAGAAAACTACAA | |
| | | | AAACCTAGTAAGCCTAGGAT | |
| | | | ACCAACTAACAAAACCAGAC | |
| | | | GTAATACTAAGACTAGAAAA | |
| | | | AGGAGAAGAACCA | |
| | | | (SEQ ID NO: 1311) | |
| Glutamine; | 32 | DAKSLTAWSRTLVTFKDVFV | GACGCCAAGTCCCTGACCGC | 0.48972298 |
| 1; 32 | | DFTREEWKLLDTQQQUIVYR | TTGGTCTCGGACGCTTGTGA | |
| | | NVMLENYKNLVSLGYQLTKP | CCTTTAAGGATGTTTTCGTC | |
| | | DVILRLEKGEEP | GATTTCACTAGGGAAGAATG | |
| | | (SEQ ID NO: 748) | GAAACTACTAGACACACAAC | |
| | | | AACAAATAGTATACAGAAAC | |
| | | | GTAATGCTAGAAAACTACAA | |
| | | | AAACCTAGTAAGCCTAGGAT | |
| | | | ACCAACTAACAAAACCAGAC | |
| | | | GTAATACTAAGACTAGAAAA | |
| | | | AGGAGAAGAACCA | |
| | | | (SEQ ID NO: 1312) | |
| Tyrosine; | 69 | DAKSLTAWSRTLVTFKDVFV | GATGCTAAGTCCCTTACCGC | 0.48765802 |
| 2; 69 | | DFTREEWKLLDTAQQIVYRN | CTGGTCTCGGACGCTGGTCA | |
| | | VMLENYKNLVSLGYQLTKPD | CCTTCAAGGACGTGTTCGTT | |
| | | VILRLEKGEYY | GATTTTACTAGGGAAGAATG | |
| | | (SEQ ID NO: 749) | GAAACTACTAGACACAGCAC | |
| | | | AACAAATAGTATACAGAAAC | |
| | | | GTAATGCTAGAAAACTACAA | |
| | | | AAACCTAGTAAGCCTAGGAT | |
| | | | ACCAACTAACAAAACCAGAC | |
| | | | GTAATACTAAGACTAGAAAA | |
| | | | AGGAGAATACTAC | |
| | | | (SEQ ID NO: 1313) | |
| GlutamicAcid; | 7 | DAKSLTAEERTLVTFKDVFV | GATGCTAAGTCCCTTACGGC | 0.48459406 |
| 2; 7 | | DFTREEWKLLDTAQQIVYRN | CGAGGAGAGGACTCTGGTCA | |
| | | VMLENYKNLVSLGYQLTKPD | CCTTCAAGGACGTGTTCGTT | |
| | | VILRLEKGEEP | GATTTTACCCGGGAAGAATG | |
| | | (SEQ ID NO: 750) | GAAACTACTAGACACAGCAC | |
| | | | AACAAATAGTATACAGAAAC | |
| | | | GTAATGCTAGAAAACTACAA | |
| | | | AAACCTAGTAAGCCTAGGAT | |
| | | | ACCAACTAACAAAACCAGAC | |
| | | | GTAATACTAAGACTAGAAAA | |
| | | | AGGAGAAGAACCA | |
| | | | (SEQ ID NO: 1314) | |
| Histidine; | 7 | DAKSLTAHSRTLVTFKDVFV | GATGCCAAGTCTCTGACGGC | 0.48125191 |
| 1; 7 | | DFTREEWKLLDTAQQIVYRN | TCACTCCAGGACTCTTGTCA | |
| | | VMLENYKNLVSLGYQLTKPD | CCTTCAAGGATGTGTTCGTT | |
| | | VILRLEKGEEP | GACTTTACCCGGGAAGAATG | |
| | | (SEQ ID NO: 751) | GAAACTACTAGACACAGCAC | |
| | | | AACAAATAGTATACAGAAAC | |
| | | | GTAATGCTAGAAAACTACAA | |
| | | | AAACCTAGTAAGCCTAGGAT | |
| | | | ACCAACTAACAAAACCAGAC | |
| | | | GTAATACTAAGACTAGAAAA | |
| | | | AGGAGAAGAACCA | |
| | | | (SEQ ID NO: 1315) | |
| Arginine; | 5 | DAKSLRRWSRTLVTFKDVFV | GATGCCAAGTCCCTTCGCCG | 0.4801544 |
| 2; 5 | | DFTREEWKLLDTAQQUIVYR | GTGGTCTCGAACTCTGGTCA | |
| | | NVMLENYKNLVSLGYQLTKP | CCTTTAAGGATGTGTTCGTT | |
| | | DVILRLEKGEEP | GACTTCACCAGGGAAGAATG | |
| | | (SEQ ID NO: 752) | GAAACTACTAGACACAGCAC | |
| | | | AACAAATAGTATACAGAAAC | |
| | | | GTAATGCTAGAAAACTACAA | |
| | | | AAACCTAGTAAGCCTAGGAT | |
| | | | ACCAACTAACAAAACCAGAC | |
| | | | GTAATACTAAGACTAGAAAA | |
| | | | AGGAGAAGAACCA | |
| | | | (SEQ ID NO: 1316) | |
| Serine; | 9 | DAKSLTAWSSSSVTFKDVFV | GATGCTAAGTCTCTTACTGC | 0.47920968 |
| 3; 9 | | DFTREEWKLLDTAQQIVYRN | CTGGTCCAGCTCAAGTGTGA | |
| | | VMLENYKNLVSLGYQLTKPD | CCTTTAAGGACGTTTTCGTC | |
| | | VILRLEKGEEP | GATTTCACCAGGGAAGAATG | |
| | | (SEQ ID NO: 753) | GAAACTACTAGACACAGCAC | |
| | | | AACAAATAGTATACAGAAAC | |
| | | | GTAATGCTAGAAAACTACAA | |
| | | | AAACCTAGTAAGCCTAGGAT | |
| | | | ACCAACTAACAAAACCAGAC | |
| | | | GTAATACTAAGACTAGAAAA | |
| | | | AGGAGAAGAACCA | |
| | | | (SEQ ID NO: 1317) | |
| Tryptophan; | 53 | DAKSLTAWSRTLVTFKDVFV | GATGCCAAGTCTCTTACCGC | 0.47320791 |
| 1:53 | | DFTREEWKLLDTAQQIVYRN | TTGGTCCCGGACTCTGGTCA | |
| | | VMLENYKNIVSLGWQLTKPD | CGTTTAAGGACGTTTTCGTG | |
| | | VILRLEKGEEP | GATTTCACCAGGGAAGAATG | |
| | | (SEQ ID NO: 754) | GAAACTACTAGACACAGCAC | |
| | | | AACAAATAGTATACAGAAAC | |
| | | | GTAATGCTAGAAAACTACAA | |
| | | | AAACCTAGTAAGCCTAGGAT | |
| | | | GGCAACTAACAAAACCAGAC | |
| | | | GTAATACTAAGACTAGAAAA | |
| | | | AGGAGAAGAACCA | |
| | | | (SEQ ID NO: 1318) | |
| Serine; | 1 | DSSSLTAWSRTLVTFKDVFV | GATTCATCTTCCCTGACGGC | 0.47295365 |
| 3; 1 | | DFTREEWKLLDTAQQIVYRN | CTGGAGTAGGACCCTTGTTA | |
| | | VMLENYKNLVSLGYQLTKPD | CCTTCAAGGACGTCTTTGTG | |
| | | VILRLEKGEEP | GATTTCACTCGGGAAGAATG | |
| | | (SEQ ID NO: 755) | GAAACTACTAGACACAGCAC | |
| | | | AACAAATAGTATACAGAAAC | |
| | | | GTAATGCTAGAAAACTACAA | |
| | | | AAACCTAGTAAGCCTAGGAT | |
| | | | ACCAACTAACAAAACCAGAC | |
| | | | GTAATACTAAGACTAGAAAA | |
| | | | AGGAGAAGAACCA | |
| | | | (SEQ ID NO: 1319) | |
| Lysine; | 34 | DAKSLTAWSRTLVTFKDVFV | GATGCCAAGTCTCTGACCGC | 0.47168537 |
| 2; 34 | | DFTREEWKLLDTAQKKVYRN | TTGGTCCCGGACTCTTGTGA | |
| | | VMLENYKNLVSLGYQLTKPD | CGTTCAAGGACGTCTTTGTT | |
| | | VILRLEKGEEP | GATTTCACCAGGGAAGAATG | |
| | | (SEQ ID NO: 756) | GAAACTACTAGACACAGCAC | |
| | | | AAAAAAAAGTATACAGAAAC | |
| | | | GTAATGCTAGAAAACTACAA | |
| | | | AAACCTAGTAAGCCTAGGAT | |
| | | | ACCAACTAACAAAACCAGAC | |
| | | | GTAATACTAAGACTAGAAAA | |
| | | | AGGAGAAGAACCA | |
| | | | (SEQ ID NO: 1320) | |
| Lysine; | 7 | DAKSLTAKKKTLVTFKDVFV | GACGCTAAGTCCCTGACCGC | 0.47075243 |
| 3; 7 | | DFTREEWKLLDTAQQIVYRN | CAAGAAGAAGACTCTTGTCA | |
| | | VMLENYKNLVSLGYQLTKPD | CCTTCAAGGATGTTTTCGTG | |
| | | VILRLEKGEEP | GATTTTACGAGGGAAGAATG | |
| | | (SEQ ID NO: 757) | GAAACTACTAGACACAGCAC | |
| | | | AACAAATAGTATACAGAAAC | |
| | | | GTAATGCTAGAAAACTACAA | |
| | | | AAACCTAGTAAGCCTAGGAT | |
| | | | ACCAACTAACAAAACCAGAC | |
| | | | GTAATACTAAGACTAGAAAA | |
| | | | AGGAGAAGAACCA | |
| | | | (SEQ ID NO: 1321) | |
| Glycine; | 9 | DAKSLTAWSGGGVTFKDVFV | GATGCTAAGTCCCTTACCGC | 0.46950237 |
| 3; 9 | | DFTREEWKLLDTAQQIVYRN | CTGGTCTGGGGGTGGCGTGA | |
| | | VMLENYKNIVSLGYQLTKPD | CCTTCAAGGATGTTTTCGTC | |
| | | VILRLEKGEEP | GACTTTACTAGGGAAGAATG | |
| | | (SEQ ID NO: 758) | GAAACTACTAGACACAGCAC | |
| | | | AACAAATAGTATACAGAAAC | |
| | | | GTAATGCTAGAAAACTACAA | |
| | | | AAACCTAGTAAGCCTAGGAT | |
| | | | ACCAACTAACAAAACCAGAC | |
| | | | GTAATACTAAGACTAGAAAA | |
| | | | AGGAGAAGAACCA | |
| | | | (SEQ ID NO: 1322) | |
| AsparticAcid; | 9 | DAKSLTAWSDDDVTFKDVFV | GATGCCAAGTCCCTTACTGC | 0.4685333 |
| 3; 9 | | DFTREEWKLLDTAQQIVYRN | TTGGTCTGACGATGATGTGA | |
| | | VMLENYKNLVSLGYQLTKPD | CCTTCAAGGATGTTTTCGTC | |
| | | VILRLEKGEEP | GACTTTACCAGGGAAGAATG | |
| | | (SEQ ID NO: 759) | GAAACTACTAGACACAGCAC | |
| | | | AACAAATAGTATACAGAAAC | |
| | | | GTAATGCTAGAAAACTACAA | |
| | | | AAACCTAGTAAGCCTAGGAT | |
| | | | ACCAACTAACAAAACCAGAC | |
| | | | GTAATACTAAGACTAGAAAA | |
| | | | AGGAGAAGAACCA | |
| | | | (SEQ ID NO: 1323) | |
| Threonine; | 3 | DAKTTTAWSRTLVTFKDVFV | GATGCTAAGACTACCACGGC | 0.46756614 |
| 2; 3 | | DFTREEWKLLDTAQQIVYRN | CTGGTCCAGGACTCTTGTTA | |
| | | VMLENYKNLVSLGYQLTKPD | CCTTTAAGGATGTCTTCGTG | |
| | | VILRLEKGEEP | GACTTCACCCGGGAAGAATG | |
| | | (SEQ ID NO: 760) | GAAACTACTAGACACAGCAC | |
| | | | AACAAATAGTATACAGAAAC | |
| | | | GTAATGCTAGAAAACTACAA | |
| | | | AAACCTAGTAAGCCTAGGAT | |
| | | | ACCAACTAACAAAACCAGAC | |
| | | | GTAATACTAAGACTAGAAAA | |
| | | | AGGAGAAGAACCA | |
| | | | (SEQ ID NO: 1324) | |
| Glycine; | 8 | DAKSLTAWGGGLVTFKDVFV | GATGCCAAGTCCCTTACTGC | 0.46569305 |
| 3; 8 | | DFTREEWKLLDTAQQIVYRN | TTGGGGCGGTGGGCTGGTGA | |
| | | VMLENYKNLVSLGYQLTKPD | CCTTCAAGGACGTTTTTGTC | |
| | | VILRLEKGEEP | GATTTCACCAGGGAAGAATG | |
| | | (SEQ ID NO: 761) | GAAACTACTAGACACAGCAC | |
| | | | AACAAATAGTATACAGAAAC | |
| | | | GTAATGCTAGAAAACTACAA | |
| | | | AAACCTAGTAAGCCTAGGAT | |
| | | | ACCAACTAACAAAACCAGAC | |
| | | | GTAATACTAAGACTAGAAAA | |
| | | | AGGAGAAGAACCA | |
| | | | (SEQ ID NO: 1325) | |
| GlutamicAcid; | 10 | DAKSLTAWSRELVTFKDVFV | GACGCCAAGTCTCTGACTGC | 0.46430578 |
| 1; 10 | | DFTREEWKLLDTAQQIVYRN | TTGGTCCCGGGAGCTTGTGA | |
| | | VMLENYKNLVSLGYQLTKPD | CCTTTAAGGATGTCTTCGTT | |
| | | VILRLEKGEEP | GATTTCACCAGGGAAGAATG | |
| | | (SEQ ID NO: 762) | GAAACTACTAGACACAGCAC | |
| | | | AACAAATAGTATACAGAAAC | |
| | | | GTAATGCTAGAAAACTACAA | |
| | | | AAACCTAGTAAGCCTAGGAT | |
| | | | ACCAACTAACAAAACCAGAC | |
| | | | GTAATACTAAGACTAGAAAA | |
| | | | AGGAGAAGAACCA | |
| | | | (SEQ ID NO: 1326) | |
| AsparticAcid; | 4 | DAKSDDDWSRTLVTFKDVFV | GACGCCAAGTCTGATGATGA | 0.4639914 |
| 3; 4 | | DFTREEWKLLDTAQQIVYRN | CTGGTCCCGGACCCTTGTCA | |
| | | VMLENYKNLVSLGYQLTKPD | CCTTCAAGGATGTTTTCGTG | |
| | | VILRLEKGEEP | GATTTTACTAGGGAAGAATG | |
| | | (SEQ ID NO: 763) | GAAACTACTAGACACAGCAC | |
| | | | AACAAATAGTATACAGAAAC | |
| | | | GTAATGCTAGAAAACTACAA | |
| | | | AAACCTAGTAAGCCTAGGAT | |
| | | | ACCAACTAACAAAACCAGAC | |
| | | | GTAATACTAAGACTAGAAAA | |
| | | | AGGAGAAGAACCA | |
| | | | (SEQ ID NO: 1327) | |
| Serine; | 5 | DAKSLSSSSRTLVTFKDVFV | GACGCCAAGTCACTTAGCAG | 0.46366844 |
| 3; 5 | | DFTREEWKLLDTAQQIVYRN | TTCCTCTAGGACTCTGGTGA | |
| | | VMLENYKNLVSLGYQLTKPD | CCTTTAAGGATGTCTTCGTT | |
| | | VILRLEKGEEP | GATTTCACCCGGGAAGAATG | |
| | | (SEQ ID NO: 764) | GAAACTACTAGACACAGCAC | |
| | | | AACAAATAGTATACAGAAAC | |
| | | | GTAATGCTAGAAAACTACAA | |
| | | | AAACCTAGTAAGCCTAGGAT | |
| | | | ACCAACTAACAAAACCAGAC | |
| | | | GTAATACTAAGACTAGAAAA | |
| | | | AGGAGAAGAACCA | |
| | | | (SEQ ID NO: 1328) | |
| Serine; | 7 | DAKSLTASSSTLVTFKDVFV | GACGCTAAGTCCCTTACGGC | 0.45082917 |
| 3; 7 | | DFTREEWKLLDTAQQIVYRN | CTCTAGTTCAACCCTGGTGA | |
| | | VMLENYKNLVSLGYQLTKPD | CCTTCAAGGATGTCTTCGTT | |
| | | VILRLEKGEEP | GATTTTACTAGGGAAGAATG | |
| | | (SEQ ID NO: 765) | GAAACTACTAGACACAGCAC | |
| | | | AACAAATAGTATACAGAAAC | |
| | | | GTAATGCTAGAAAACTACAA | |
| | | | AAACCTAGTAAGCCTAGGAT | |
| | | | ACCAACTAACAAAACCAGAC | |
| | | | GTAATACTAAGACTAGAAAA | |
| | | | AGGAGAAGAACCA | |
| | | | (SEQ ID NO: 1329) | |

TABLE 4
Tiling Repressors

| | | Avg Day 5 |
|---|---|---|
| Gene | Sequence | Score |
| KRBOX1 | MMTAVSLTTRPQESVAFEDV | 7.8278029 |
| | AVYFTTKEWAIMVPAERALY | |
| | RDVMLENYEAVAFVVPPTSK | |
| | PALVSHLEQGKESCFTQPQG | |
| | (SEQ ID NO: 766) | |
| ZNF461 | MAHELVMFRDVAIDVSQEEW | 7.7007641 |
| | ECLNPAQRNLYKEVMLENYS | |
| | NLVSLGLSVSKPAVISSLEQ | |
| | GKEPWMVVREETGRWCPGTW | |
| | (SEQ ID NO: 767) | |
| ZNF875 | MSCSGAGGITAFVAFRDVAV | 7.41648619 |
| | YFTQEEWRLLSPAQRTLHRE | |
| | VMLETYNHLVSLEIPSSKPK | |
| | LIAQLERGEAPWREERKCPL | |
| | (SEQ ID NO: 768) | |
| ZNF57 | MDSVVFEDVAVDFTLEEWAL | 7.33652783 |
| | LDSAQRDLYRDVMLETFRNL | |
| | ASVDDGTQFKANGSVSLQDM | |
| | YGQEKSKEQTIPNFTGNNSC | |
| | (SEQ ID NO: 769) | |
| CBX5 | NDIARGFERGLEPEKIIGAT | 6.80089192 |
| | DSCGDLMFLMKWKDTDEADL | |
| | VLAKEANVKCPQIVIAFYEE | |
| | RLTWHAYPEDAENKEKETAK | |
| | (SEQ ID NO: 770) | |
| CBX3 | SKKKRDAADKPRGFARGLDP | 6.7879261 |
| | ERIIGATDSSGELMFLMKWK | |
| | DSDEADLVLAKEANMKCPQI | |
| | VIAFYEERLTWHSCPEDEAQ | |
| | (SEQ ID NO: 771) | |
| CBX1 | KKKKEESEKPRGFARGLEPE | 6.68230107 |
| | RIIGATDSSGELMFLMKWKN | |
| | SDEADLVPAKEANVKCPQVV | |
| | ISFYEERLTWHSYPSEDDDK | |
| | (SEQ ID NO: 772) | |
| CTCF | PVTVPVATTSVEELQGAYEN | 6.25722327 |
| | EVSKEGLAESEPMICHTLPL | |
| | PEGFQVVKVGANGEVETLEQ | |
| | GELPPQEDPSWQKDPDYQPP | |
| | (SEQ ID NO: 773) | |
| RYBP | PPSEANSIQSANATTKTSET | 6.18591064 |
| | NHTSRPRLKNVDRSTAQQLA | |
| | VTVGNVTVIITDFKEKTRSS | |
| | STSSSTVTSSAGSEQQNQSS | |
| | (SEQ ID NO: 774) | |
| IRF2BP1 | MASVQASRRQWCYLCDLPKM | 5.6588422 |
| | PWAMVWDFSEAVCRGCVNFE | |
| | GADRIELLIDAARQLKRSHV | |
| | LPEGRSPGPPALKHPATKDL | |
| | (SEQ ID NO: 775) | |
| MGA | PHTSANLVMTPQGQLLTLKG | 5.6156366 |
| | PLFSGPVVAVSPDLLESDLK | |
| | PQVAGSAVALPENDDLFMMP | |
| | RIVNVTSLATEGGLVDMGGS | |
| | (SEQ ID NO: 776) | |
| CBX7 | ELFLQEPPAPDVLQAAGEWE | 5.00371758 |
| | PAAQPPEEEADADLAEGPPP | |
| | WTPALPSSEVTVTDITANSI | |
| | TVTFREAQAAEGFFRDRSGK | |
| | (SEQ ID NO: 777) | |
| IKZF5 | TPSIGNSQPSTPAPALPVQD | 4.98433253 |
| | PQLLHHCQHCDMYFADNILY | |
| | TIHMGCHGYENPFQCNICGC | |
| | KCKNKYDFACHFARGQHNQH | |
| | (SEQ ID NO: 778) | |
| REST | IHSHEGSDLSDNMSEGSDDS | 4.52776703 |
| | GLHGARPVPQESSRKNAKEA | |
| | LAVKAAKGDFVCIFCDRSFR | |
| | KGKDYSKHLNRHLVNVYYLE | |
| | (SEQ ID NO: 779) | |
| CBX4 | RSEAGEPPSSLQVKPETPAS | 4.52247518 |
| | AAVAVAAAAAPTTTAEKPPA | |
| | EAQDEPAESLSEFKPFFGNI | |
| | IITDVTANCLTVTFKEYVTV | |
| | (SEQ ID NO: 780) | |
| KLF10 | APFKEEEKSPVSAPKLPKAQ | 4.49441205 |
| | ATSVIRHTADAQLCNHQTCP | |
| | MKAASILNYQNNSFRRRTHL | |
| | NVEAARKNIPCAAVSPNRSK | |
| | (SEQ ID NO: 781) | |
| SCMH1 | DASRLSGRDPSSWTVEDVMQ | 4.38546257 |
| | FVREADPQLGPHADLFRKHE | |
| | IDGKALLLLRSDMMMKYMGL | |
| | KLGPALKLSYHIDRLKQGKF | |
| | (SEQ ID NO: 782) | |
| SCML2 | KQGFSKDPSTWSVDEVIQFM | 4.3468225 |
| | KHTDPQISGPLADLFRQHEI | |
| | DGKALFLLKSDVMMKYMGLK | |
| | LGPALKLCYYIEKLKEGKYS | |
| | (SEQ ID NO: 783) | |
| HIVEP3 | GSGSESGKERRTTSKEISVI | 4.34368367 |
| | QHTSSFEKSDSLEQPSGLEG | |
| | EDKPLAQFPSPPPAPHGRSA | |
| | HSLQPKLVRQPNIQVPEILV | |
| | (SEQ ID NO: 784) | |
| HSF2 | SSAQKVQIKQETIESRLSEL | 4.31444003 |
| | KSENESLWKEVSELRAKHAQ | |
| | QQQVIRKIVQFIVTLVQNNQ | |
| | LVSLKRKRPLLLNTNGAQKK | |
| | (SEQ ID NO: 785) | |
| MBD1 | TSPVLVPGCPSKAVDPGLPS | 4.25873478 |
| | VKQEPPDPEEDKEENKDDSA | |
| | SKLAPEEEAGGAGTPVITEI | |
| | FSLGGTRFRDTAVWLPRSKD | |
| | (SEQ ID NO: 786) | |
| BAZ2A | GQDSEQPQAQLQPEAQLHAP | 4.17482075 |
| | AQPQPQLQLQLQSHKGFLEQ | |
| | EGSPLSLGQSQHDLSQSAFL | |
| | SWLSQTQSHSSLLSSSVLTP | |
| | (SEQ ID NO: 787) | |
| CHD4 | EILCDTCPRAYHMVCLDPDM | 4.15410157 |
| | EKAPEGKWSCPHCEKEGIQW | |
| | EAKEDNSEGEEILEEVGGDL | |
| | EEEDDHHMEFCRVCKDGGE | |
| | (SEQ ID NO: 788) | |
| ATF7IP | DSSGVIDLTMDDEESGASQD | 4.13988404 |
| | PKKLNHTPVSTMSSSQPVSR | |
| | PLQPIQPAPPLQPSGVPTSG | |
| | PSQTTIHLLPTAPTTVNVTH | |
| | (SEQ ID NO: 789) | |
| PCGF2 | MHRTTRIKITELNPHLMCAL | 4.08140835 |
| | CGGYFIDATTIVECLHSFCK | |
| | TCIVRYLETNKYCPMCDVQV | |
| | HKTRPLLSIRSDKTLQDIVY | |
| | (SEQ ID NO: 790) | |
| HSF1 | KIRQDSVTKLLTDVQLMKGK | 3.89748786 |
| | QECMDSKLLAMKHENEALWR | |
| | EVASLRQKHAQQQKVVNKLI | |
| | QFLISLVQSNRILGVKRKIP | |
| | (SEQ ID NO: 791) | |
| WIZ | LQQKLEEVRQPPPRVRPVPS | 3.88045025 |
| | LVPRPPQTSLVKFVGNIYTL | |
| | KCRFCEVEFQGPLSIQEEWV | |
| | RHLQRHILEMNFSKADPPPE | |
| | (SEQ ID NO: 792) | |
| CBX7 | MELSAIGEQVFAVESIRKKR | 3.86396312 |
| | VRKGKVEYLVKWKGWPPKYS | |
| | TWEPEEHILDPRLVMAYEEK | |
| | EERDRASGYRKRGPKPKRLL | |
| | (SEQ ID NO: 793) | |
| UHRF1 | CGGRQDPDKQLMCDECDMAF | 3.85377779 |
| | HIYCLDPPLSSVPSEDEWYC | |
| | PECRNDASEVVLAGERLRES | |
| | KKKAKMASATSSSQRDWGKG | |
| | (SEQ ID NO: 794) | |
| MGA | ALSEVPQLKQEISECLIASS | 3.82825762 |
| | FEDDSRVASPLDQNGSFNVV | |
| | IKEEPLDDYDYELGECPEGV | |
| | TVKQEETDEETDVYSNSDDD | |
| | (SEQ ID NO: 795) | |
| SIN3B | SAGHEKLPVHVEDALTYLDQ | 3.67861396 |
| | VKIRFGSDPATYNGFLEIMK | |
| | EFKSQSIDTPGVIRRVSQLF | |
| | HEHPDLIVGFNAFLPLGYRI | |
| | (SEQ ID NO: 796) | |
| MECP2 | TSTQVMVIKRPGRKRKAEAD | 3.54786112 |
| | PQAIPKKRGRKPGSVVAAAA | |
| | AEAKKKAVKESSIRSVQETV | |
| | LPIKKRKTRETVSIEVKEVV | |
| | (SEQ ID NO: 797) | |
| ATF7IP | MDSLEEPQKKVFKARKTMRV | 3.46711815 |
| | SDRQQLEAVYKVKEELLKTD | |
| | VKLLNGNHENGDLDPTSPLE | |
| | NMDYIKDKEEVNGIEEICFD | |
| | (SEQ ID NO: 798) | |
| INSM2 | CHKKFRRQAYLRKHLSTHEA | 3.41894392 |
| | GSARALAPGFGSERGAPLAF | |
| | ACPLCGAHFPTADIREKHRL | |
| | WHAVREELLLPALAGAPPET | |
| | (SEQ ID NO: 799) | |
| KDMSB | LLDSSNSSASASQAMNIKIE | 3.41515767 |
| | PEETTEARTHNLRRRMGCPT | |
| | PKCENEKEMKSSIKQEPIER | |
| | KDYIVENEKEKPKSRSKKAT | |
| | (SEQ ID NO: 800) | |
| TRIM24 | PVSGSSPFATQVGVIRCPVC | 3.34747947 |
| | SQECAERHIIDNFFVKDTTE | |
| | VPSSTVEKSNQVCTSCEDNA | |
| | EANGFCVECVEWLCKTCIRA | |
| | (SEQ ID NO: 801) | |
| MBD1 | MAEDWLDCPALGPGWKRREV | 3.31964355 |
| | FRKSGATCGRSDTYYQSPTG | |
| | DRIRSKVELTRYLGPACDLT | |
| | LFDFKQGILCYPAPKAHPVA | |
| | (SEQ ID NO: 802) | |
| SIN3A | PVQGQQQFQRLKVEDALSYL | 3.30578618 |
| | DQVKLQFGSQPQVYNDFLDI | |
| | MKEFKSQSIDTPGVISRVSQ | |
| | LFKGHPDLIMGFNTFLPPGY | |
| | (SEQ ID NO: 803) | |
| DMD | RAKQPDLAPGLTTIGASPTQ | 3.29433336 |
| | TVTLVTQPVVTKETAISKLE | |
| | MPSSLMLEVPALADFNRAWT | |
| | ELTDWLSLLDQVIKSQRVMV | |
| | (SEQ ID NO: 804) | |
| ZNF827 | HMRCHQHFLRTEAKVKEEIP | 3.26257067 |
| | DPDVKGSPHLSDSACLGQQR | |
| | EGGGTELVGTMMTSNTPERT | |
| | SQGGAGVSPLLVKEEPKEDN | |
| | (SEQ ID NO: 805) | |
| HIPK2 | QRQTIVIPDTPSPTVSVITI | 3.2515196 |
| | SSDTDEEEEQKHAPTSTVSK | |
| | QRKNVISCVTVHDSPYSDSS | |
| | SNTSPYSVQQRAGHNNANAF | |
| | (SEQ ID NO: 806) | |
| MBD1 | SGDGTQRQRLKTLCKDCRAQ | 3.18634467 |
| | RIAFNREQRMFKRVGCGECA | |
| | ACQVTEDCGACSTCLLQLPH | |
| | DVASGLFCKCERRRCLRIVE | |
| | (SEQ ID NO: 807) | |
| TET2 | KMAEKAREKEEECEKYGPDY | 3.17106197 |
| | VPQKSHGKKVKREPAEPHET | |
| | SEPTYLRFIKSLAERTMSVT | |
| | TDSTVTTSPYAFTRVTGPYN | |
| | (SEQ ID NO: 808) | |
| CBX8 | GSGPPSSGGGLYRDMGAQGG | 3.14200153 |
| | RPSLIARIPVARILGDPEEE | |
| | SWSPSLTNLEKVVVTDVTSN | |
| | FLTVTIKESNTDQGFFKEKR | |
| | (SEQ ID NO: 809) | |
| HES3 | GSTMDSAGLGQEAPALFRPC | 3.13473999 |
| | TPAVWAPAPAAGGPRSPPPL | |
| | LLLPESLPGSSASVPPPQPA | |
| | SSRCAESPGLGLRVWRPWGS | |
| | (SEQ ID NO: 810) | |
| TRPS1 | EDGHAISTIKEEPKIDFRVY | 3.11964253 |
| | NLLTPDSKMGEPVSESVVKR | |
| | EKLEEKDGLKEKVWTESSSD | |
| | DLRNVTWRGADILRGSPSYT | |
| | (SEQ ID NO: 811) | |
| TRIM24 | VGSRGSSGSSSKPAGADSTH | 3.10950731 |
| | KVPVVMLEPIRIKQENSGPP | |
| | ENYDFPVVIVKQESDEESRP | |
| | QNANYPRSILTSLLLNSSQS | |
| | (SEQ ID NO: 812) | |
| TET1 | NEGDQPKTPENIPSKEPKDG | 3.01568183 |
| | SPVQPSLLSLMKDRRLTLEQ | |
| | VVAIEALTQLSEAPSENSSP | |
| | SKSEKDEESEQRTASLLNSC | |
| | (SEQ ID NO: 813) | |
| BAZ2B | CRKGDNEELLLLCDGCDKGC | 2.99449946 |
| | HTYCHRPKITTIPDGDWFCP | |
| | ACIAKASGQTLKIKKLHVKG | |
| | KKTNESKKGKKVTLTGDTED | |
| | (SEQ ID NO: 814) | |
| ATRX | SDEQKIKPVTENLVLSSHTG | 2.99299407 |
| | FCQSSGDEALSKSVPVTVDD | |
| | DDDDNDPENRIAKKMLLEEI | |
| | KANLSSDEDGSSDDEPEEGK | |
| | (SEQ ID NO: 815) | |
| DMD | QQHKVLQEDLEQEQVRVNSL | 2.95216006 |
| | THMVVVVDESSGDHATAALE | |
| | EQLKVLGDRWANICRWTEDR | |
| | WVLLQDILLKWQRLTEEQCL | |
| | (SEQ ID NO: 816) | |
| TRIM24 | QVCTSCEDNAEANGFCVECV | 2.94621718 |
| | EWLCKTCIRAHQRVKFTKDH | |
| | TVRQKEEVSPEAVGVTSQRP | |
| | VFCPFHKKEQLKLYCETCDK | |
| | (SEQ ID NO: 817) | |
| AHRR | LDVSIKMEKDSGCEGAADGC | 2.91519283 |
| | VPSQVWLGASDRSHPATFPT | |
| | RMHLKTEPDSRQQVYISHLG | |
| | HGVRGAQPHGRATAGRSREL | |
| | (SEQ ID NO: 818) | |
| CBX4 | MELPAVGEHVFAVESIEKKR | 2.8451435 |
| | IRKGRVEYLVKWRGWSPKYN | |
| | TWEPEENILDPRLLIAFQNR | |
| | ERQEQLMGYRKRGPKPKPLV | |
| | (SEQ ID NO: 819) | |
| AUTS2 | GSLQGAFQPKTSNPIDVAAR | 2.80116399 |
| | PGTVPHTLLQKDPRLTDPFR | |
| | PMLRKPGKWCAMHVHIAWQI | |
| | YHHQQKVKKQMQSDPHKLD | |
| | F | |
| | (SEQ ID NO: 820) | |
| PLAG1 | LKVKTEPVDFLDPFTCNVSV | 2.78382024 |
| | PIKDELLPVMSLPSSELLSK | |
| | PFTNTLQLNLYNTPFQSMQS | |
| | SGSAHQMITTLPLGMTCPID | |
| | (SEQ ID NO: 821) | |
| ZNF827 | LVKEEPKEDNGLPTSFTLNA | 2.76221951 |
| | ADRPANHTKLKDPSEYVANS | |
| | ASALFSQDISVKMASDFLMK | |
| | LSAANQKEPMNLNFKVKEEP | |
| | (SEQ ID NO: 822) | |
| TET3 | EPQNHFSSFKYSGNAVVESY | 2.67090027 |
| | SVLGNCRPSDPYSMNSVYSY | |
| | HSYYAQPSLTSVNGFHSKYA | |
| | LPSFSYYGFPSSNPVFPSQF | |
| | (SEQ ID NO: 823) | |
| RCOR3 | IPEFDPGATKYTDKDNGGML | 2.6595258 |
| | VWSPYHSIPDAKLDEYIAIA | |
| | KEKHGYNVEQALGMLFWHKH | |
| | NIEKSLADLPNFTPFPDEWT | |
| | (SEQ ID NO: 824) | |
| DNMT3B | KNPVSFHPLFEGGLCQTCRD | 2.65664419 |
| | RFLELFYMYDDDGYQSYCTV | |
| | CCEGRELLLCSNTSCCRCFC | |
| | VECLEVLVGTGTAAEAKLQE | |
| | (SEQ ID NO: 825) | |
| IKZF2 | DTTKAPKGSLKDIYKVENGE | 2.65607702 |
| | GEQIRAFKCEHCRVLFLDHV | |
| | MYTIHMGCHGYRDPLECNIC | |
| | GYRSQDRYEFSSHIVRGEHT | |
| | (SEQ ID NO: 826) | |
| DNMT3B | PAVRTRNNNSVSSRERHRPS | 2.64875126 |
| | PRSTRGRQGRNHVDESPVEF | |
| | PATRSLRRRATASAGTPWPS | |
| | PPSSYLTIDLTDDTEDTHGT | |
| | (SEQ ID NO: 827) | |
| ZNF827 | AESYKETQMVKIKEEPMEVD | 2.6349517 |
| | IQDSHVSISPSRNVGYSTLI | |
| | GREKTEPLQKMPEGRVPPER | |
| | NLFSQDISVKMASELLFQLS | |
| | (SEQ ID NO: 828) | |
| ATF7IP | NQKLQKVIQWLLEEKLCALQ | 2.62333283 |
| | CAVFDKTLAELKTRVEKIEC | |
| | NKRHKTVLTELQAKIARLTK | |
| | RFEAAKEDLKKRHEHPPNPP | |
| | (SEQ ID NO: 829) | |
| KDM5C | VVVKEELGGDVKVESTSPKT | 2.62226329 |
| | FLESKEELSHSPEPCTKMTM | |
| | RLRRNHSNAQFIESYVCRMC | |
| | SRGDEDDKLLLCDGCDDNYH | |
| | (SEQ ID NO: 830) | |
| SUV39H1 | MAENLKGCSVCCKSSWNQLQ | 2.61048387 |
| | DLCRLAKLSCPALGISKRNL | |
| | YDFEVEYLCDYKKIREQEYY | |
| | LVKWRGYPDSESTWEPRQNL | |
| | (SEQ ID NO: 831) | |
| HES1 | APCKLGSQAGEAAKVFGGFQ | 2.54719284 |
| | VVPAPDGQFAFLIPNGAFAH | |
| | SGPVIPVYTSNSGTSVGPNA | |
| | VSPSSGPSLTADSMWRPWRN | |
| | (SEQ ID NO: 832) | |
| HIVEP3 | VKKEDSKEQPDLPSLAPPSS | 2.54212172 |
| | LPLSETSSRPAKSQEGTDSK | |
| | KVLQFPSLHTTTNVSWCYLN | |
| | YIKPNHIQHADRRSSVYAGW | |
| | (SEQ ID NO: 833) | |
| ZNF446 | QLSCSVKEEPNVDGQEVAPS | 2.53378337 |
| | SPPLAAQSPEGNHGHQEPAS | |
| | TSFHPPRIQEEWGLLDRSQK | |
| | ELYWDAMLEKYGTVVSLGLP | |
| | (SEQ ID NO: 834) | |
| HEY2 | TSSVIRLNSPTTTSQIMARK | 2.52262483 |
| | KRRGIIEKRRRDRINNSLSE | |
| | LRRLVPTAFEKQGSAKLEKA | |
| | EILQMTVDHLKMLQATGGKG | |
| | (SEQ ID NO: 835) | |
| PRDM11 | TVVKTEVCSPLRDQEYGQPC | 2.50622782 |
| | SRRPDSSAMEVEPKKLKGKR | |
| | DLIVPKSFQQVDFWFCESCQ | |
| | EYFVDECPNHGPPVFVSDTP | |
| | (SEQ ID NO: 836) | |
| PHF19 | EGQYVLCRWTDGLYYLGKIK | 2.50329194 |
| | RVSSSKQSCLVTFEDNSKYW | |
| | VLWKDIQHAGVPGEEPKCNI | |
| | CLGKTSGPLNEILICGKCGL | |
| | (SEQ ID NO: 837) | |
| CBX3 | KVEEAEPEEFVVEKVLDRRV | 2.46766682 |
| | VNGKVEYFLKWKGFTDADNT | |
| | WEPEENLDCPELIEAFLNSQ | |
| | KAGKEKDGTKRKSLSDSESD | |
| | (SEQ ID NO: 838) | |
| FBRS | NPELPPRLGPVPSGLSQKGT | 2.4558407 |
| | QIPDHFRPPLRKPGKWCAMH | |
| | VRVAYMILRHQEKMKGDSHK | |
| | LDFRNDLLPCLPGPYGALPP | |
| | (SEQ ID NO: 839) | |
| CIC | FPSKVCLQLKIREVRQKIMQ | 2.42893202 |
| | AATPTEQPPGAEAPLPVPPP | |
| | TGTAAAPAPTPSPAGGPDPT | |
| | SPSSDSGTAQAAPPLPPPPE | |
| | (SEQ ID NO: 840) | |
| PCGF6 | EEEEEEEEEDMSHFSLRLEG | 2.4085226 |
| | GRQDSEDEEERLINLSELTP | |
| | YILCSICKGYLIDATTITEC | |
| | LHTFCKSCIVRHFYYSNRCP | |
| | (SEQ ID NO: 841) | |
| MNT | DDKKTSNLSVLRTALRYIQS | 2.39586222 |
| | LKRKEKEYEHEMERLAREKI | |
| | ATQQRLAELKHELSQWMDVL | |
| | EIDRVLRQTGQPEDDQASTS | |
| | (SEQ ID NO: 842) | |
| HSF1 | LEHVHGSGPYSAPSPAYSSS | 2.39135328 |
| | SLYAPDAVASSGPIISDITE | |
| | LAPASPMASPGGSIDERPLS | |
| | SSPLVRVKEEPPSPPQSPRV | |
| | (SEQ ID NO: 843) | |
| SERTAD2 | ITTSTGFLTDLTLDDILFAD | 2.35712893 |
| | IDTSMYDFDPCTSSSGTASK | |
| | MAPVSADDLLKTLAPYSSQP | |
| | VTPSQPFKMDLTELDHIMEV | |
| | (SEQ ID NO: 844) | |
| BMI1 | MHRTTRIKITELNPHLMCVL | 2.34528179 |
| | CGGYFIDATTIIECLHSFCK | |
| | TCIVRYLETSKYCPICDVQV | |
| | HKTRPLLNIRSDKTLQDIVY | |
| | (SEQ ID NO: 845) | |
| TET3 | RPRLPGPLPPGEAGLPAPST | 2.33879669 |
| | RPLLSSEVPQISPQEGLPLS | |
| | QSALSIAKEKNISLQTAIAI | |
| | EALTQLSSALPQPSHSTPQA | |
| | (SEQ ID NO: 846) | |
| USP7 | MYDPKTRSLNYCGHIYTPIS | 2.32632143 |
| | CKIRDLLPVMCDRAGFIQDT | |
| | SLILYEEVKPNLTERIQDYD | |
| | VSLDKALDELMDGDIIVFQK | |
| | (SEQ ID NO: 847) | |
| TRIM28 | SQPPVFKVFPGSTTEDYNLI | 2.30375349 |
| | VIERGAAAAATGQPGTAPAG | |
| | TPGAPPLAGMAIVKEEETEA | |
| | AIGAPPTATEGPETKPVLMA | |
| | (SEQ ID NO: 848) | |
| L3MBTL3 | TVAGIPASKVSKWSTDEVSE | 2.28373726 |
| | FIQSLPGCEEHGKVFKDEQI | |
| | DGEAFLLMTQTDIVKIMSIK | |
| | LGPALKIFNSILMFKAAEKN | |
| | (SEQ ID NO: 849) | |
| IKZF4 | PQEGLLRGTPGPSKEVLRVV | 2.28172595 |
| | GESGEPVKAFKCEHCRILFL | |
| | DHVMFTIHMGCHGFRDPFEC | |
| | NICGYHSQDRYEFSSHIVRG | |
| | (SEQ ID NO: 850) | |
| KDM5B | CGSGNDEDRLLLCDGCDDSY | 2.26045013 |
| | HTFCLIPPLHDVPKGDWRCP | |
| | KCLAQECSKPQEAFGFEQAA | |
| | RDYTLRTFGEMADAFKSDYF | |
| | (SEQ ID NO: 851) | |
| GATAD2A | QVVMPPLVRGAQQIHSIRQH | 2.24549867 |
| | SSTGPPPLLLAPRASVPSVQ | |
| | IQGQRIIQQGLIRVANVPNT | |
| | SLLVNIPQPTPASLKGTTAT | |
| | (SEQ ID NO: 852) | |
| BRMS1 | QERIQRLEEDRQSLDLSSEW | 2.23400084 |
| | WDDKLHARGSSRSWDSLPPS | |
| | KRKKAPLVSGPYIVYMLQEI | |
| | DILEDWTAIKKARAAVSPQK | |
| | (SEQ ID NO: 853) | |
| DNMT1 | PLSKPRTPRRSKSDGEAKPE | 2.18589467 |
| | PSPSPRITRKSTRQTTITSH | |
| | FAKGPAKRKPQEESERAKSD | |
| | ESIKEEDKDQDEKRRRVTSR | |
| | (SEQ ID NO: 854) | |
| ZNF366 | MGHMHLHSDSKPFKCLYCPS | 2.17275454 |
| | KFTLKGNLTRHMKVKHGVME | |
| | RGLHSQGLGRGRIALAQTAG | |
| | VLRSLEQEEPFDLSQKRRAK | |
| | (SEQ ID NO: 855) | |
| NAB2 | GELQLYRVLQRANLLSYYET | 2.17138822 |
| | FIQQGGDDVQQLCEAGEEEF | |
| | LEIMALVGMATKPLHVRRLQ | |
| | KALREWATNPGLFSQPVPAV | |
| | (SEQ ID NO: 856) | |
| KDM1A | QLQEKHVKDEQIEHWKKIVK | 2.13679618 |
| | TQEELKELLNKMVNLKEKIK | |
| | ELHQQYKEASEVKPPRDITA | |
| | EFLVKSKHRDLTALCKEYDE | |
| | (SEQ ID NO: 857) | |
| TGS1 | LQSKKDTETENPPVENTLSP | 2.11925487 |
| | KLEITEKWEKYWNEYGGGLL | |
| | WQSWQEKHPGQALSSEPWNF | |
| | PDTKEEWEQHYSQLYWYYLE | |
| | (SEQ ID NO: 858) | |
| PRDM11 | VSKEPGQLEDEEEEPSSFKA | 2.07885469 |
| | DSPAEASLASDPHELPTTSF | |
| | CPNCIRLKKKVRELQAELDM | |
| | LKSGKLPEPPVLPPQVLELP | |
| | (SEQ ID NO: 859) | |
| HDAC6 | PGEENLLGEAAGGQDMADSM | 2.03482535 |
| | LMQGSRGLTDQAIFYAVTPL | |
| | PWCPHLVAVCPIPAAGLDVT | |
| | QPCGDCGTIQENWVCLSCYQ | |
| | (SEQ ID NO: 860) | |
| CBX1 | MGKKQNKKKVEEVLEEEEEE | 2.01737869 |
| | YVVEKVLDRRVVKGKVEYLL | |
| | KWKGFSDEDNTWEPEENLDC | |
| | PDLIAEFLQSQKTAHETDKS | |
| | (SEQ ID NO: 861) | |
| TRIM8 | VEEKVNQLKEEVRLQYEKLH | 1.99485782 |
| | QLLDEDLRQTVEVLDKAQAK | |
| | FCSENAAQALHLGERMQEAK | |
| | KLLGSLQLLFDKTEDVSFMK | |
| | (SEQ ID NO: 862) | |
| MDFI | QTHPSLASQGSKKSKSSSKS | 1.98953136 |
| | TTSQIPLQAQEDCCVHCILS | |
| | CLFCEFLTLCNIVLDCATCG | |
| | SCSSEDSCLCCCCCGSGECA | |
| | (SEQ ID NO: 863) | |
| NCOR1 | HRGSTAGEVYRSHLPTHLDP | 1.98515002 |
| | AMPFHRALDPAAAAYLFQRQ | |
| | LSPTPGYPSQYQLYAMENTR | |
| | QTILNDYITSQQMQVNLRPD | |
| | (SEQ ID NO: 864) | |
| HIVEP3 | KKERKPQKPGKYICQYCSRP | 1.97820999 |
| | CAKPSVLQKHIRSHTGERPY | |
| | PCGPCGFSFKTKSNLYKHRK | |
| | SHAHRIKAGLASGMGGEMYP | |
| | (SEQ ID NO: 865) | |
| IKZF1 | AASENSQDALRVVSTSGEQM | 1.97447058 |
| | KVYKCEHCRVLFLDHVMYTI | |
| | HMGCHGFRDPFECNMCGYHS | |
| | QDRYEFSSHITRGEHRFHMS | |
| | (SEQ ID NO: 866) | |
| CDK2AP1 | TSSQYRQLLSDYGPPSLGYT | 1.96228244 |
| | QGTGNSQVPQSKYAELLAII | |
| | EELGKEIRPTYAGSKSAMER | |
| | LKRGIIHARGLVRECLAETE | |
| | (SEQ ID NO: 867) | |
| ERF | SEGESEEVEVTDISDEDEED | 1.94839175 |
| | GEVFKTPRAPPAPPKPEPGE | |
| | APGASQCMPLKLRFKRRWSE | |
| | DCRLEGGGGPAGGFEDEGED | |
| | (SEQ ID NO: 868) | |
| KDM5C | IPKGVWRCPKCVMAECKRPP | 1.94183352 |
| | EAFGFEQATREYTLQSFGEM | |
| | ADSFKADYFNMPVHMVPTEL | |
| | VEKEFWRLVNSIEEDVTVEY | |
| | (SEQ ID NO: 869) | |
| ZNF446 | LLGWITAHVLKQEVLPAAQK | 1.92348688 |
| | TEEPLGSPHPSGTVESPGEG | |
| | PQDTRIEGSVQLSCSVKEEP | |
| | NVDGQEVAPSSPPLAAQSPE | |
| | (SEQ ID NO: 870) | |
| CBFA2T3 | DPRELRERHRPLVVPGSRQE | 1.92105376 |
| | EVIDHKLTEREWAEEWKHLN | |
| | NLLNCIMDMVEKTRRSLTVL | |
| | RRCQEADREELNHWARRYSD | |
| | (SEQ ID NO: 871) | |
| USP7 | SDRREDYYDIQLSIKGKKNI | 1.90807263 |
| | FESFVDYVAVEQLDGDNKYD | |
| | AGEHGLQEAEKGVKFLTLPP | |
| | VLHLQLMRFMYDPQTDQNIK | |
| | (SEQ ID NO: 872) | |
| SETDB1 | EIAELQQAVVEELGISMEEL | 1.89374023 |
| | RHFIDEELEKMDCVQQRKKQ | |
| | LAELETWVIQKESEVAHVDQ | |
| | LFDDASRAVTNCESLVKDFY | |
| | (SEQ ID NO: 873) | |
| PHF1 | FPTDIPKSAPHSMTASSSSV | 1.88511381 |
| | SSPSPGLPRRSAPPSPLCRS | |
| | LSPGTGGGVRGGVGYLSRGD | |
| | PVRVLARRVRPDGSVQYLVE | |
| | (SEQ ID NO: 874) | |
| IKZF3 | LKPPPICPRDSVKVINKEGE | 1.87983916 |
| | VMDVYRCDHCRVLFLDYVMF | |
| | TIHMGCHGFRDPFECNMCGY | |
| | RSHDRYEFSSHIARGEHRAL | |
| | (SEQ ID NO: 875) | |
| HDAC4 | EHQALLDEPYLDRLPGQKEA | 1.86554151 |
| | HAQAGVQVKQEPIESDEEEA | |
| | EPPREVEPGQRQPSEQELLF | |
| | RQQALLLEQQRIHQLRNYQA | |
| | (SEQ ID NO: 876) | |
| DNMT3L | AEPSMDVILVGSSELSSSVS | 1.85705086 |
| | PGTGRDLIAYEVKANQRNIE | |
| | DICICCGSLQVHTQHPLFEG | |
| | GICAPCKDKFLDALFLYDDD | |
| | (SEQ ID NO: 877) | |
| HDAC9 | SSACVDDTLGQVGAVKVKEE | 1.85605728 |
| | PVDSDEDAQIQEMESGEQAA | |
| | FMQQPFLEPTHTRALSVRQA | |
| | PLAAVGMDGLEKHRLVSRTH | |
| | (SEQ ID NO: 878) | |
| ZSCAN22 | VKVEEEEEASLSQGGESSHD | 1.83277386 |
| | HIAHSEAARLRFRHFRYEEA | |
| | SGPHEALAHLRALCCQWLQP | |
| | EAHSKEQILELLVLEQFLGA | |
| | (SEQ ID NO: 879) | |
| E2F6 | QDIHSIQAFHEQIVIAVKAP | 1.82276829 |
| | AETRLDVPAPREDSITVHIR | |
| | STNGPIDVYLCEVEQGQTSN | |
| | KRSEGVGTSSSESTHPEGPE | |
| | (SEQ ID NO: 880) | |
| KDM5A | AAQNCQRPCKDKVDWVQCDG | 1.78690918 |
| | GCDEWFHQVCVGVSPEMAEN | |
| | EDYICINCAKKQGPVSPGPA | |
| | PPPSFIMSYKLPMEDLKETS | |
| | (SEQ ID NO: 881) | |
| RBBP7 | KEGKIVDAKAIFTGHSAVVE | 1.77403489 |
| | DVAWHLLHESLFGSVADDQK | |
| | LMIWDTRSNTTSKPSHLVDA | |
| | HTAEVNCLSFNPYSEFILAT | |
| | (SEQ ID NO: 882) | |
| ATRX | EREREKLREVIEIEDASPTK | 1.77379044 |
| | CPITTKLVLDEDEETKEPLV | |
| | QVHRNMVIKLKPHQVDGVQF | |
| | MWDCCCESVKKTKKSPGSGC | |
| | (SEQ ID NO: 883) | |
| ZNF446 | EPETARLRFRGFCYQEVAGP | 1.7514371 |
| | REALARLRELCCQWLQPEAH | |
| | SKEQMLEMLVLEQFLGTLPP | |
| | EIQAWVRGQRPGSPEEAAAL | |
| | (SEQ ID NO: 884) | |
| GATAD2B | PVVQNAASIVQPSPAHVGQQ | 1.71132166 |
| | GLSKLPSRPGAQGVEPQNLR | |
| | TLQGHSVIRSATNTTLPHML | |
| | MSQRVIAPNPAQLQGQRGPP | |
| | (SEQ ID NO: 885) | |
| TET2 | TESCHSQMHRPIKVEPGCKP | 1.67625849 |
| | HACMHTAPPENKTWKKVTKQ | |
| | ENPPASCDNVQQKSIIETME | |
| | QHLKQFHAKSLFDHKALTLK | |
| | (SEQ ID NO: 886) | |
| NCOR2 | VVPKEEKEEETAAAPPVEEG | 1.65967202 |
| | EEQKPPAAEELAVDTGKAEE | |
| | PVKSECTEEAEEGPAKGKDA | |
| | EAAEATAEGALKAEKKEGGS | |
| | (SEQ ID NO: 887) | |
| BCOR | PPMKSLSSTSAGGKKQAQPS | 1.65199942 |
| | CAPASRPPAKQQKIKENQKT | |
| | DVLCADEEEDCQAASLLQKY | |
| | TDNSEKPSGKRLCKTKHLIP | |
| | (SEQ ID NO: 889) | |
| RBL2 | TSRDSSPVMRSSSTLPVPQP | 1.65141032 |
| | SSAPPTPTRLTGANSDMEEE | |
| | ERGDLIQFYNNIYIKQIKTF | |
| | AMKYSQANMDAPPLSPYPFV | |
| | (SEQ ID NO: 890) | |
| KDM5D | IPRGIWRCPKCILAECKQPP | 1.59348979 |
| | EAFGFEQATQEYSLQSFGEM | |
| | ADSFKSDYFNMPVHMVPTEL | |
| | VEKEFWRLVSSIEEDVTVEY | |
| | (SEQ ID NO: 891) | |
| TRIM8 | STQHLVALPGGAQPVHSSPV | 1.56673764 |
| | FPPSQYPNGSAAQQPMLPQY | |
| | GGRKILVCSVDNCYCSSVAN | |
| | HGGHQPYPRSGHFPWTVPSQ | |
| | (SEQ ID NO: 892) | |
| KLF3 | ILPVIQPVVVQPVPFMYTSH | 1.56352551 |
| | LQQPLMVSLSEEMENSSSSM | |
| | QVPVIESYEKPISQKKIKIE | |
| | PGIEPQRTDYYPEEMSPPLM | |
| | (SEQ ID NO: 893) | |
| MTA2 | YGGLKTPTQLEGATRGTTEP | 1.53904229 |
| | HSRGHLSRPEAQSLSPYTTS | |
| | ANRAKLLAKNRQTFLLQTTK | |
| | LTRLARRMCRDLLQPRRAAR | |
| | (SEQ ID NO: 894) | |
| PHF1 | MAQPPRLSRSGASSLWDPAS | 1.53480472 |
| | PAPTSGPRPRLWEGQDVLAR | |
| | WTDGLLYLGTIKKVDSAREV | |
| | CLVQFEDDSQFLVLWKDISP | |
| | (SEQ ID NO: 895) | |
| RCOR1 | AKLARRSQERDNLGMLVWSP | 1.39637997 |
| | NQNLSEAKLDEYIAIAKEKH | |
| | GYNMEQALGMLFWHKHNIEK | |
| | SLADLPNFTPFPDEWTVEDK | |
| | (SEQ ID NO: 896) | |

### REFERENCES

[0203] Al Chiblak, M., Steinbeck, F., Thiesen, H.-J., and Lorenz, P. (2019). DUF3669, a “domain of unknown function” within ZNF746 and ZNF777, oligomerizes and contributes to transcriptional repression. BMC Mol Cell Biol 20, 60.
[0204] Amabile, A., Migliara, A., Capasso, P., Biffi, M., Cittaro, D., Naldini, L., and Lombardo, A. (2016). Inheritable Silencing of Endogenous Genes by Hit-and-Run Targeted Epigenetic Editing. Cell 167, 219-232.e14.
[0205] Arnold, C. D., Nemčko, F., Woodfin, A. R., Wienerroither, S., Vlasova, A., Schleiffer, A., Pagani, M., Rath, M., and Stark, A. (2018). A high-throughput method to identify trans-activation domains within transcription factor sequences. EMBO J. e98896.
[0206] Ashkenazy, H., Erez, E., Martz, E., Pupko, T., and Ben-Tal, N. (2010). ConSurf 2010. calculating evolutionary conservation in sequence and structure of proteins and nucleic acids. Nucleic Acids Res. 38, W529-W533.
[0207] Bakan, A., Meireles, L. M., and Bahar, I. (2011). ProDy: protein dynamics inferred from theory and experiments. Bioinformatics 27, 1575-1577.
[0208] Ballas, N., Battaglioli, E., Atouf, F., Andres, M. E., Chenoweth, J., Anderson, M. E., Burger, C., Moniwa, M., Davie, J. R., Bowers, W. J., et al. (2001). Regulation of neuronal traits by a novel transcriptional complex. Neuron 31, 353-365.
[0209] Berezin, C., Glaser, F., Rosenberg, J., Paz, I., Pupko, T., Fariselli, P., Casadio, R., and Ben-Tal, N. (2004). ConSeq: the identification of functionally and structurally important residues in protein sequences. Bioinformatics 20, 1322-1324.
[0210] Bersaglieri, C., and Santoro, R. (2019). Genome Organization in and around the Nucleolus. Cells 8.
[0211] Bintu, L., Yong, J., Antebi, Y. E., McCue, K., Kazuki, Y., Uno, N., Oshimura, M., and Elowitz, M. B. (2016). Dynamics of epigenetic regulation at the single-cell level. Science 351, 720-724.
[0212] Birbach, A., Bailey, S. T., Ghosh, S., and Schmid, J. A. (2004). Cytosolic, nuclear and nucleolar localization signals determine subcellular distribution and activity of the NF-kappaB inducing kinase NIK. J. Cell Sci. 117, 3615-3624.
[0213] Birtle, Z., and Ponting, C. P. (2006). Meisetz and the birth of the KRAB motif. Bioinformatics 22, 2841-2845.
[0214] Blackledge, N. P., Farcas, A. M., Kondo, T., King, H. W., McGouran, J. F., Hanssen, L. L. P., Ito, S., Cooper, S., Kondo, K., Koseki, Y., et al. (2014). Variant PRC1 complex-dependent H2A ubiquitylation drives PRC2 recruitment and polycomb domain formation. Cell 157, 1445-1459.
[0215] Chang, Y., Sun, L., Kokura, K., Horton, J. R., Fukuda, M., Espejo, A., Izumi, V., Koomen, J. M., Bedford, M. T., Zhang, X., et al. (2011). MPP8 mediates the interactions between DNA methyltransferase Dnmt3a and H3K9 methyltransferase GLP/G9a. Nat. Commun. 2, 533.
[0216] Cheng, C.-T., Kuo, C.-Y., and Ann, D. K. (2014). KAPtain in charge of multiple missions: Emerging roles of KAP1. World J. Biol. Chem. 5, 308-320.
[0217] Chevron, M. P., Girard, F., Claustres, M., and Demaille, J. (1994). Expression and subcellular localization of dystrophin in skeletal, cardiac and smooth muscles during the human development. Neuromuscul. Disord. 4, 419-432.
[0218] Childs, K. S., and Goodbourn, S. (2003). Identification of novel co-repressor molecules for Interferon Regulatory Factor-2. Nucleic Acids Res. 31, 3016-3026.
[0219] Chittock, E. C., Latwiel, S., Miller, T. C. R., and Müller, C. W. (2017). Molecular architecture of polycomb repressive complexes. Biochem. Soc. Trans. 45, 193-205.
[0220] Chupreta, S., Holmstrom, S., Subramanian, L., and Iñiguez-Lluhï, J. A. (2005). A small conserved surface in SUMO is the critical structural determinant of its transcriptional inhibitory properties. Mol. Cell. Biol. 25, 4272-4282.
[0221] Copley, R. R. (2005). The EH1 motif in metazoan transcription factors. BMC Genomics 6, 169.
[0222] Corsetti, M. T., Levi, G., Lancia, F., Sanseverino, L., Ferrini, S., Boncinelli, E., and Corte, G. (1995). Nucleolar localisation of three Hox homeoproteins. J. Cell Sci. 108 (Pt 1), 187-193.
[0223] Dorris, D. R., and Struhl, K. (2000). Artificial recruitment of TFIID, but not RNA polymerase II holoenzyme, activates transcription in mammalian cells. Mol. Cell. Biol. 20, 4350-4358.
[0224] Drueppel, L., Pfleiderer, K., Schmidt, A., Hillen, W., and Berens, C. (2004). A short autonomous repression motif is located within the N-terminal domain of CTCF. FEBS Lett. 572, 154-158.
[0225] Duboule, D., and Morata, G. (1994). Colinearity and functional hierarchy among genes of the homeotic complexes. Trends in Genetics 10, 358-364.
[0226] El-Gebali, S., Mistry, J., Bateman, A., Eddy, S. R., Luciani, A., Potter, S. C., Qureshi, M., Richardson, L. J., Salazar, G. A., Smart, A., et al. (2019). The Pfam protein families database in 2019. Nucleic Acids Res. 47, D427-D432.
[0227] Elliott, K., Sakamuro, D., Basu, A., Du, W., Wunner, W., Staller, P., Gaubatz, S., Zhang, H., Prochownik, E., Eilers, M., et al. (1999). Bin1 functionally interacts with Myc and inhibits cell proliferation via multiple mechanisms. Oncogene 18, 3564-3573.
[0228] ENCODE Project Consortium, Moore, J. E., Purcaro, M. J., Pratt, H. E., Epstein, C. B., Shoresh, N., Adrian, J., Kawli, T., Davis, C. A., Dobin, A., et al. (2020). Expanded encyclopaedias of DNA elements in the human and mouse genomes. Nature 583, 699-710.
[0229] Erijman, A., Kozlowski, L., Sohrabi-Jahromi, S., Fishburn, J., Warfield, L., Schreiber, J., Noble, W. S., Söding, J., and Hahn, S. (2020). A High-Throughput Screen for Transcription Activation Domains Reveals Their Sequence Features and Permits Prediction by Deep Learning. Mol. Cell 78, 890-902.e6.
[0230] Feng, J., Liu, T., Qin, B., Zhang, Y., and Liu, X. S. (2012). Identifying ChIP-seq enrichment using MACS. Nat. Protoc. 7, 1728-1740.
[0231] Fowler, D. M., and Fields, S. (2014). Deep mutational scanning: a new style of protein science. Nat. Methods 11, 801-807.
[0232] Frey, F., Sheahan, T., Finkl, K., Stoehr, G., Mann, M., Benda, C., and Müller, J. (2016). Molecular basis of PRC1 targeting to Polycomb response elements by PhoRC. Genes Dev. 30, 1116-1127.
[0233] Garcia, E., Marcos-Gutierrez, C., del Mar Lorente, M., Moreno, J. C., and Vidal, M. (1999). RYBP, a new repressor protein that interacts with components of the mammalian Polycomb complex, and with the transcription factor YY1. EMBO J. 18, 3404-3418.
[0234] Gaudreau, L., Keaveney, M., Nevado, J., Zaman, Z., Bryant, G. O., Struhl, K., and Ptashne, M. (1999). Transcriptional activation by artificial recruitment in yeast is influenced by promoter architecture and downstream sequences. Proc. Natl. Acad. Sci. U.S.A 96, 2668-2673.
[0235] Gilbert, S. F. (1971). Developmental Biology (Sinauer Associates).
[0236] Gilbert, L. A., Horlbeck, M. A., Adamson, B., Villalta, J. E., Chen, Y., Whitehead, E. H., Guimaraes, C., Panning, B., Ploegh, H. L., Bassik, M. C., et al. (2014). Genome-Scale CRISPR-Mediated Control of Gene Repression and Activation. Cell 159, 647-661.
[0237] Guetg, C., Lienemann, P., Sirri, V., Grummt, I., Hernandez-Verdun, D., Hottiger, M. O., Fussenegger, M., and Santoro, R. (2010). The NoRC complex mediates the heterochromatin formation and stability of silent rRNA genes and centromeric repeats. EMBO J. 29, 2135-2146.
[0238] Haney, M. S., Bohlen, C. J., Morgens, D. W., Ousey, J. A., Barkal, A. A., Tsui, C. K., Ego, B. K., Levin, R., Kamber, R. A., Collins, H., et al. (2018). Identification of phagocytosis regulators using magnetic genome-wide CRISPR screens. Nat. Genet. 50, 1716-1727.
[0239] Helleboid, P.-Y., Heusel, M., Duc, J., Piot, C., Thorball, C. W., Coluccio, A., Pontis, J., Imbeault, M., Turelli, P., Aebersold, R., et al. (2019). The interactome of KRAB zinc finger proteins reveals the evolutionary history of their functional diversification. EMBO J. 38, e101220.
[0240] Heredia, J. D., Park, J., Brubaker, R. J., Szymanski, S. K., Gill, K. S., and Procko, E. (2018). Mapping Interaction Sites on Human Chemokine Receptors by Deep Mutational Scanning. J. Immunol. 200, 3825-3839.
[0241] Holland, P. W. H., Booth, H. A. F., and Bruford, E. A. (2007). Classification and nomenclature of all human homeobox genes. BMC Biol. 5, 47.
[0242] Hueber, S. D., Weiller, G. F., Djordjevic, M. A., and Frickey, T. (2010). Improving Hox protein classification across the major model organisms. PLoS One 5, e10820.
[0243] Hyun, K., Jeon, J., Park, K., and Kim, J. (2017). Writing, erasing and reading histone lysine methylations. Exp. Mol. Med. 49, e324.
[0244] Imbeault, M., Helleboid, P.-Y., and Trono, D. (2017). KRAB zinc-finger proteins contribute to the evolution of gene regulatory networks. Nature 543, 550-554.
[0245] Johnson, M., Zaretskaya, I., Raytselis, Y., Merezhuk, Y., McGinnis, S., and Madden, T. L. (2008). NCBI BLAST: a better web interface. Nucleic Acids Res. 36, W5-W9.
[0246] Jolma, A., Yan, J., Whitington, T., Toivonen, J., Nitta, K. R., Rastas, P., Morgunova, E., Enge, M., Taipale, M., Wei, G., et al. (2013). DNA-binding specificities of human transcription factors. Cell 152, 327-339.
[0247] Keung, A. J., Bashor, C. J., Kiriakov, S., Collins, J. J., and Khalil, A. S. (2014). Using targeted chromatin regulators to engineer combinatorial and spatial transcriptional regulation. Cell 158, 110-120.
[0248] Kim, G.-D., Ni, J., Kelesoglu, N., Roberts, R. J., and Pradhan, S. (2002). Co-operation and communication between the human maintenance and de novo DNA (cytosine-5) methyltransferases. EMBO J. 21, 4183-4195.
[0249] Kinsella, R. J., Kihari, A., Haider, S., Zamora, J., Proctor, G., Spudich, G., Almeida-King, J., Staines, D., Derwent, P., Kerhornou, A., et al. (2011). Ensembl BioMarts: a hub for data retrieval across taxonomic space. Database 2011, bar030.
[0250] Konermann, S., Brigham, M. D., Trevino, A. E., Joung, J., Abudayyeh, O. O., Barcena, C., Hsu, P. D., Habib, N., Gootenberg, J. S., Nishimasu, H., et al. (2014). Genome-scale transcriptional activation by an engineered CRISPR-Cas9 complex. Nature 517, 583-588.
[0251] Kotler, E., Shani, O., Goldfeld, G., Lotan-Pompan, M., Tarcic, O., Gershoni, A., Hopf, T. A., Marks, D. S., Oren, M., and Segal, E. (2018). A Systematic p53 Mutation Library Links Differential Functional Impact to Cancer Mutation Pattern and Evolutionary Conservation. Mol. Cell 71, 873.
[0252] Lambert, S. A., Jolma, A., Campitelli, L. F., Das, P. K., Yin, Y., Albu, M., Chen, X., Taipale, J., Hughes, T. R., and Weirauch, M. T. (2018). The Human Transcription Factors. Cell 175, 598-599.
[0253] Langmead, B., Trapnell, C., Pop, M., and Salzberg, S. L. (2009). Ultrafast and memory-efficient alignment of short DNA sequences to the human genome. Genome Biol. 10, R25.
[0254] Lechner, M. S., Begg, G. E., Speicher, D. W., and Rauscher, F. J. (2000). Molecular Determinants for Targeting Heterochromatin Protein 1-Mediated Gene Silencing: Direct Chromoshadow Domain-KAP-1 Corepressor Interaction Is Essential. Mol. Cell. Biol. 20, 6449-6465.
[0255] Li, Q., Wang, X., Lu, Z., Zhang, B., Guan, Z., Liu, Z., Zhong, Q., Gu, L., Zhou, J., Zhu, B., et al. (2010). Polycomb CBX7 directly controls trimethylation of histone H3 at lysine 9 at the p16 locus. PLoS One 5, e13732.
[0256] Liu, J., Perumal, N. B., Oldfield, C. J., Su, E. W., Uversky, V. N., and Dunker, A. K. (2006). Intrinsic disorder in transcription factors. Biochemistry 45, 6873-6888.
[0257] Losson, R., and Nielsen, A. L. (2010). The NIZP1 KRAB and C2HR domains cross-talk for transcriptional regulation. Biochim. Biophys. Acta 1799, 463-468.
[0258] Lynch, V. J., Roth, J. J., and Wagner, G. P. (2006). Adaptive evolution of Hox-gene homeodomains after cluster duplications. BMC Evol. Biol. 6, 86.
[0259] Mallo, M., and Alonso, C. R. (2013). The regulation of Hox gene expression during animal development. Development 140, 3951-3963.
[0260] Mann, R. S., and Hogness, D. S. (1990). Functional dissection of Ultrabithorax proteins in D. melanogaster. Cell 60, 597-610.
[0261] Margolin, J. F., Friedman, J. R., Meyer, W. K., Vissing, H., Thiesen, H. J., and Rauscher, F. J. (1994). Kruppel-associated boxes are potent transcriptional repression domains. Proc. Natl. Acad. Sci. U.S.A 91, 4509-4513.
[0262] Martin, R. M., Ter-Avetisyan, G., Herce, H. D., Ludwig, A. K., Lättig-Tünnemann, G., and Cardoso, M. C. (2015). Principles of protein targeting to the nucleolus. Nucleus 6, 314-325.
[0263] McWilliam, H., Li, W., Uludag, M., Squizzato, S., Park, Y. M., Buso, N., Cowley, A. P., and Lopez, R. (2013). Analysis Tool Web Services from the EMBL-EBI. Nucleic Acids Res. 41, W597-W600.
[0264] Mifsud, W., and Bateman, A. (2002). Membrane-bound progesterone receptors contain a cytochrome b5-like ligand-binding domain. Genome Biol. 3, RESEARCH0068.
[0265] Mitchell, P. J., and Tjian, R. (1989). Transcriptional regulation in mammalian cells by sequence-specific DNA binding proteins. Science 245, 371-378.
[0266] Mitrea, D. M., Cika, J. A., Guy, C. S., Ban, D., Banerjee, P. R., Stanley, C. B., Nourse, A., Deniz, A. A., and Kriwacki, R. W. (2016). Nucleophosmin integrates within the nucleolus via multi-modal interactions with proteins displaying R-rich linear motifs and rRNA. Elife 5.
[0267] Moussa, H. F., Bsteh, D., Yelagandula, R., Pribitzer, C., Stecher, K., Bartalska, K., Michetti, L., Wang, J., Zepeda-Martinez, J. A., Elling, U., et al. (2019). Canonical PRC1 controls sequence-independent propagation of Polycomb-mediated gene silencing. Nat. Commun. 10, 1931.
[0268] Najafabadi, H. S., Mnaimneh, S., Schmitges, F. W., Garton, M., Lam, K. N., Yang, A., Albu, M., Weirauch, M. T., Radovani, E., Kim, P. M., et al. (2015). C2H2 zinc finger proteins greatly expand the human regulatory lexicon. Nat. Biotechnol. 33, 555-562.
[0269] Nevado, J., Gaudreau, L., Adam, M., and Ptashne, M. (1999). Transcriptional activation by artificial recruitment in mammalian cells. Proceedings of the National Academy of Sciences 96, 2674-2677.
[0270] Nott, A., Holtman, I. R., Coufal, N. G., Schlachetzki, J. C. M., Yu, M., Hu, R., Han, C. Z., Pena, M., Xiao, J., Wu, Y., et al. (2019). Brain cell type-specific enhancer-promoter interactome maps and disease-risk association. Science 366, 1134-1139.
[0271] Partridge, E. C., Christopher Partridge, E., Chhetri, S. B., Prokop, J. W., Ramaker, R. C., Jansen, C. S., Goh, S.-T., Mackiewicz, M., Newberry, K. M., Brandsmeier, L. A., et al. (2020). Occupancy maps of 208 chromatin-associated proteins in one human cell type. Nature 583, 720-728.
[0272] Peng, H., Gibson, L. C., Capili, A. D., Borden, K. L. B., Osborne, M. J., Harper, S. L., Speicher, D. W., Zhao, K., Marmorstein, R., Rock, T. A., et al. (2007). The Structurally Disordered KRAB Repression Domain Is Incorporated into a Protease Resistant Core upon Binding to KAP-1-RBCC Domain. Journal of Molecular Biology 370, 269-289.
[0273] Peng, H., Ivanov, A. V., Oh, H. J., Lau, Y.-F. C., and Rauscher, F. J., 3rd (2009). Epigenetic gene silencing by the SRY protein is mediated by a KRAB-O protein that recruits the KAP1 corepressor machinery. J. Biol. Chem. 284, 35670-35680.
[0274] Pupko, T., Bell, R. E., Mayrose, I., Glaser, F., and Ben-Tal, N. (2002). Rate4Site: an algorithmic tool for the identification of functional regions in proteins by surface mapping of evolutionary determinants within their homologues. Bioinformatics 18 Suppl 1, S71-S77.
[0275] Ramalingam, A., and Prendergast, G. C. (2007). Bin1 homolog hob1 supports a Rad6-Set1 pathway of transcriptional repression in fission yeast. Cell Cycle 6, 1655-1662.
[0276] Ravarani, C. N. J., Erkina, T. Y., De Baets, G., Dudman, D. C., Erkine, A. M., and Babu, M. M. (2018). High-throughput discovery of functional disordered regions: investigation of transactivation domains. Mol. Syst. Biol. 14, e8190.
[0277] Roney, I. J., Rudner, A. D., Couture, J.-F., and Kçrn, M. (2016). Improvement of the reverse tetracycline transactivator by single amino acid substitutions that reduce leaky target gene expression to undetectable levels. Sci. Rep. 6, 27697.
[0278] Rueden, C. T., Schindelin, J., Hiner, M. C., DeZonia, B. E., Walter, A. E., Arena, E. T., and Eliceiri, K. W. (2017). ImageJ2: ImageJ for the next generation of scientific image data. BMC Bioinformatics 18, 529.
[0279] Sadowski, I., Ma, J., Triezenberg, S., and Ptashne, M. (1988). GAL4-VP16 is an unusually potent transcriptional activator. Nature 335, 563-564.
[0280] Schmitges, F. W., Radovani, E., Najafabadi, H. S., Barazandeh, M., Campitelli, L. F., Yin, Y., Jolma, A., Zhong, G., Guo, H., Kanagalingam, T., et al. (2016). Multiparameter functional diversity of human C2H2 zinc finger proteins. Genome Res. 26, 1742-1752.
[0281] Schnabel, C. A., and Abate-Shen, C. (1996). Repression by HoxA7 is mediated by the homeodomain and the modulatory action of its N-terminal-arm residues. Mol. Cell. Biol. 16, 2678-2688.
[0282] Sidore, A. M., Plesa, C., Samson, J. A., Lubock, N. B., and Kosuri, S. (2020). DropSynth 2.0: high-fidelity multiplexed gene synthesis in emulsions. Nucleic Acids Res.
[0283] Sievers, F., Wilm, A., Dineen, D., Gibson, T. J., Karplus, K., Li, W., Lopez, R., McWilliam, H., Remmert, M., Soding, J., et al. (2011). Fast, scalable generation of high-quality protein multiple sequence alignments using Clustal Omega. Mol. Syst. Biol. 7, 539.
[0284] Sievers, Q. L., Petzold, G., Bunker, R. D., Renneville, A., Slabicki, M., Liddicoat, B. J., Abdulrahman, W., Mikkelsen, T., Ebert, B. L., and Thomä, N. H. (2018). Defining the human C2H2 zinc finger degrome targeted by thalidomide analogs through CRBN. Science 362.
[0285] Sims, R. J., 3rd, Nishioka, K., and Reinberg, D. (2003). Histone lysine methylation: a signature for chromatin function. Trends Genet. 19, 629-639.
[0286] Sirri, V., Urcuqui-Inchima, S., Roussel, P., and Hernandez-Verdun, D. (2008). Nucleolus: the fascinating nuclear body. Histochem. Cell Biol. 129, 13-31.
[0287] Staller, M. V., Holehouse, A. S., Swain-Lenz, D., Das, R. K., Pappu, R. V., and Cohen, B. A. (2018). A High-Throughput Mutational Scan of an Intrinsically Disordered Acidic Transcriptional Activation Domain. Cell Syst 6, 444-455.e6.
[0288] Stielow, B., Finkernagel, F., Stiewe, T., Nist, A., and Suske, G. (2018). MGA, L3MBTL2 and E2F6 determine genomic binding of the non-canonical Polycomb repressive complex PRC1.6. PLoS Genet. 14, e1007193.
[0289] Takahashi, H., Kasahara, K., and Kokubo, T. (2009). Saccharomyces cerevisiae Med9 comprises two functionally distinct domains that play different roles in transcriptional regulation. Genes Cells 14, 53-67.
[0290] UniProt Consortium (2015). UniProt: a hub for protein information. Nucleic Acids Res. 43, D204-D212.
[0291] Wang, R., Taylor, A. B., and Kim, C. A. (2010). Ring1B C-terminal domain/RYBP C-terminal domain Complex.
[0292] Waterhouse, A. M., Procter, J. B., Martin, D. M. A., Clamp, M., and Barton, G. J. (2009). Jalview Version 2—a multiple sequence alignment editor and analysis workbench. Bioinformatics 25, 1189-1191.
[0293] Wellik, D. M., and Capecchi, M. R. (2003). Hox10 and Hox11 genes are required to globally pattern the mammalian skeleton. Science 301, 363-367.
[0294] Witzgall, R., O'Leary, E., Leaf, A., Onaldi, D., and Bonventre, J. V. (1994). The Krüppel-associated box-A (KRAB-A) domain of zinc finger proteins mediates transcriptional repression. Proc. Natl. Acad. Sci. U.S.A 91, 4514-4518.
[0295] Zhao, Y., and Potter, S. S. (2001). Functional specificity of the Hoxa13 homeobox. Development 128, 3197-3207.

[0296] Zhao, J., Wang, M., Chang, L., Yu, J., Song, A., Liu, C., Huang, W., Zhang, T., Wu, X., Shen, X., et al. (2020). RYBP/YAF2-PRC1 complexes and histone H1-dependent chromatin compaction mediate propagation of H2AK119ub1 during cell division. Nat. Cell Biol. 22, 439-452.
[0297] Zulkower, V., and Rosser, S. (2020). DNA Chisel, a versatile sequence optimizer. Bioinformatics.

1. A method for identifying transcriptional repressor or activator domains, comprising:
a) preparing a domain library comprising a plurality of nucleic acid sequences each configured to express a fusion protein comprising a protein domain linked to an inducible DNA binding domain;
b) transforming reporter cells with the domain library, wherein a reporter cell comprises a two-part reporter gene comprising a surface marker and a fluorescent protein,
wherein the two-part reporter gene is under the control of a strong promoter and capable of being silenced by a putative transcriptional repressor domain following treatment with a first agent configured to induce the inducible DNA binding domain, or
wherein the two part reporter gene is under the control of a weak promoter and capable of being activated by a putative transcriptional activator domain following treatment with a second agent configured to induce the inducible DNA binding domain;
c) treating the reporter cells with the fi agent for a length of time necessary for protein and mRNA degradation in the cell or treating the reporter cells with the second agent for a length of time necessary for protein and mRNA production in the cell;
d) separating reporter cells based on presence or absence of the surface marker, the fluorescent protein, or a combination thereof;
e) sequencing the protein domains from the separated reporter cells;
f) calculating for each protein domain sequence a ratio of sequencing counts from reporter cells not having the surface marker, the fluorescent protein, or a combination thereof to sequencing counts from reporter cells having the surface marker, the fluorescent protein, or a combination thereof; and
g) identifying protein domains as transcriptional repressor or activator.

2. The method of claim 1, further comprising stopping treatment of the reporter cells with the first or second agent and repeating steps d-g one or more times.

3. The method of claim 2, wherein steps d-g are repeated at least 48 hours after stopping treatment of the reported cells with the first or second agent.

4. The method of claim 1, wherein each protein domain is less than or equal to 80 amino acids.

5. The method of claim 1, wherein the protein domain is from a nuclear-localized protein.

6. The method of claim 1, wherein the protein domain comprises amino acid sequences of the wild-type protein domains from nuclear-localized proteins.

7. The method of claim 1, wherein the protein domain comprises mutated amino acid sequences of protein domains from nuclear-localized proteins.

8. The method of claim 1, wherein the inducible DNA binding domain comprises a tag.

9. The method of claim 1, further comprising measuring expression level of protein domains.

10. The method of claim 9, wherein the expression level is determined by measuring a relative presence or absence of the tag on the DNA binding domain.

11. The method of claim 1, wherein the reporter cells are treated with the fit agent for at least 3 days.

12. (canceled)

13. The method of claim 1, wherein the protein domain is identified as a transcription repressor when log 2 of the ratio is at least two standard deviations from the mean of a poorly expressed negative control.

14-23. (canceled)

24. The method of claim 1, wherein the reporter cells are treated with the second agent for at least 24 hours.

25. (canceled)

26. The method of claim 1, wherein the protein domain is identified as a transcription activator when log 2 of the ratio is at least two standard deviations from the mean of weakly expressing negative control.

27. A synthetic transcription factor comprising one or more transcriptional activator domains, one or more transcriptional repressor domains, or a combination thereof fused to a heterologous DNA binding domain,
wherein at least one of the one or more transcriptional activator domains or at least one of the one or more transcriptional repressor domains comprises an amino acid sequence having at least 70% identity to any of SEQ ID NOs: 1-896.

28. The synthetic transcription factor of claim 27, comprising two or more transcriptional activator domains or two or more transcriptional repressors domains fused to a heterologous DNA binding domain.

29. The synthetic transcription factor of claim 27, wherein the at least one of the one or more transcriptional activator domain comprises an amino acid sequence having at least 70% identity to any of SEQ ID NOs: 563-664.

30. (canceled)

31. The synthetic transcription factor of claim 27, wherein the at least one of the one or more transcriptional repressor domain comprises an amino acid sequence having at least 70% identity to any of SEQ ID NOs: from 1-562 and 665-896.

32. (canceled)

33. The synthetic transcription factor of claim 27, wherein the one or more transcriptional activator domain or the one or more transcriptional repressor domain is identified by a method comprising:
a) preparing a domain library comprising a plurality of nucleic acid sequences each configured to express a fusion protein comprising a protein domain linked to an inducible DNA binding domain;
b) transforming reporter cells with the domain library, wherein a reporter cell comprises a two-part reporter gene comprising a surface marker and a fluorescent protein,
wherein the two-part reporter gene is under the control of a strong promoter and capable of being silenced by a putative transcriptional repressor domain following treatment with a first agent configured to induce the inducible DNA binding domain, or
wherein the two part reporter gene is under the control of a weak promoter and capable of being activated by a putative transcriptional activator domain following treatment with a second agent configured to induce the inducible DNA binding domain;
c) treating the reporter cells with the first agent for a length of time necessary for protein and mRNA degradation in the cell or treating the reporter cells with the second agent for a length of time necessary for protein and mRNA production in the cell;
d) separating reporter cells based on presence or absence of the surface marker, the fluorescent protein, or a combination thereof;
e) sequencing the protein domains from the separated reporter cells;
f) calculating for each protein domain sequence a ratio of sequencing counts from reporter cells not having the surface marker, the fluorescent protein, or a combination thereof to sequencing counts from reporter cells having the surface marker, the fluorescent protein, or a combination thereof; and
g) identifying a protein domain as a transcriptional repressor or activator.

34-47. (canceled)

48. A method of modulating the expression of at least one target gene in a cell, the method comprising introducing into the cell at least one synthetic transcription factor of claim 27 or a nucleic acid encoding thereof.

49-57. (canceled)

The application's sequence listing, which the Patent Office published only in electronic form, follows.

SEQUENCE LISTING (1373 sequences)

SEQ ID NO: 1 - protein, 41 aa, Artificial sequence
  Synthetic
LVTFGDVAVDFSQEEWEWLNPIQRNLYRKVMLENYRNLASL

SEQ ID NO: 2 - protein, 80 aa, Artificial sequence
  Synthetic
NKKLEAVGTGIEPKAMSQGLVTFGDVAVDFSQEEWEWLNPIQRNLYRKVMLENYRNLASLGLCVSKPDVISSLEQGKEPW

SEQ ID NO: 3 - protein, 41 aa, Artificial sequence
  Synthetic
PVSFQDLTVNFTQEEWQQLDPAQRLLYRDVMLENYSNLVSV

SEQ ID NO: 4 - protein, 80 aa, Artificial sequence
  Synthetic
KMKKFQIPVSFQDLTVNFTQEEWQQLDPAQRLLYRDVMLENYSNLVSVGYHVSKPDVIFKLEQGEEPWIVEEFSNQNYPD

SEQ ID NO: 5 - protein, 41 aa, Artificial sequence
  Synthetic
TVTFKDVAVDLTQEEWEQMKPAQRNLYRDVMLENYSNLVTV

SEQ ID NO: 6 - protein, 80 aa, Artificial sequence
  Synthetic
CSQESALSEEEEDTTRPLETVTFKDVAVDLTQEEWEQMKPAQRNLYRDVMLENYSNLVTVGCQVTKPDVIFKLEQEEEPW

SEQ ID NO: 7 - protein, 41 aa, Artificial sequence
  Synthetic
SVSFRDVTVGFTQEEWQHLDPAQRTLYRDVMLENYSHLVSV

SEQ ID NO: 8 - protein, 80 aa, Artificial sequence
  Synthetic
ITSQGSVSFRDVTVGFTQEEWQHLDPAQRTLYRDVMLENYSHLVSVGYCIPKPEVILKLEKGEEPWILEEKFPSQSHLEL

SEQ ID NO: 9 - protein, 40 aa, Artificial sequence
  Synthetic
QVTFNDVAIDFTHEEWGWLSSAQRDLYKDVMVQNYENLVS

SEQ ID NO: 10 - protein, 80 aa, Artificial sequence
  Synthetic
PQVTFNDVAIDFTHEEWGWLSSAQRDLYKDVMVQNYENLVSVAGLSVTKPYVITLLEDGKEPWMMEKKLSKGMIPDWESR

SEQ ID NO: 11 - protein, 41 aa, Artificial sequence
  Synthetic
SVSFKDVTIEFTQEEWQQMAPVQKNLYRDVMLENYSNLVSV

SEQ ID NO: 12 - protein, 80 aa, Artificial sequence
  Synthetic
PLRFSTLFQEQQKMNISQASVSFKDVTIEFTQEEWQQMAPVQKNLYRDVMLENYSNLVSVGYCCFKPEVIFKLEQGEEPW

SEQ ID NO: 13 - protein, 41 aa, Artificial sequence
  Synthetic
PVVFEDVAVYFTREEWGMLDKRQKELYRDVMRMNYELLASL

SEQ ID NO: 14 - protein, 80 aa, Artificial sequence
  Synthetic
QDPSAEGLSEEVPVVFEELPVVFEDVAVYFTREEWGMLDKRQKELYRDVMRMNYELLASLGPAAAKPDLISKLERRAAPW

SEQ ID NO: 15 - protein, 41 aa, Artificial sequence
  Synthetic
SVTFRDVAIDFSQEEWKWLQPAQRDLYRCVMLENYGHLVSL

SEQ ID NO: 16 - protein, 80 aa, Artificial sequence
  Synthetic
SQGSVTFRDVAIDFSQEEWKWLQPAQRDLYRCVMLENYGHLVSLGLSISKPDVVSLLEQGKEPWLGKREVKRDLFSVSES

SEQ ID NO: 17 - protein, 41 aa, Artificial sequence
  Synthetic
SLTFRDVAIEFSLEEWQCLDTAQQNLYRNVMLENYRNLVFL

SEQ ID NO: 18 - protein, 80 aa, Artificial sequence
  Synthetic
GSLTFRDVAIEFSLEEWQCLDTAQQNLYRNVMLENYRNLVFLGIAAFKPDLIIFLEEGKESWNMKRHEMVEESPVICSHF

SEQ ID NO: 19 - protein, 41 aa, Artificial sequence
  Synthetic
QVSFKDVCVDFTQEEWYLLDPAQKILYRDVILENYSNLVSV

SEQ ID NO: 20 - protein, 80 aa, Artificial sequence
  Synthetic
NKSQEQVSFKDVCVDFTQEEWYLLDPAQKILYRDVILENYSNLVSVGYCITKPEVIFKIEQGEEPWILEKGFPSQCHPER

SEQ ID NO: 21 - protein, 41 aa, Artificial sequence
  Synthetic
LVTFRDVAIDFSQEEWECLDPAQRDLYRDVMLENYSNLISL

SEQ ID NO: 22 - protein, 80 aa, Artificial sequence
  Synthetic
PHLLVTFRDVAIDFSQEEWECLDPAQRDLYRDVMLENYSNLISLDLESSCVTKKLSPEKEIYEMESLQWENMGKRINHHL

SEQ ID NO: 23 - protein, 41 aa, Artificial sequence
  Synthetic
SVVFEDVAVDFTQEEWALLDLAQRNLYRDVMLENFQNLASL

SEQ ID NO: 24 - protein, 80 aa, Artificial sequence
  Synthetic
EEERKTAELQKNRIQDSVVFEDVAVDFTQEEWALLDLAQRNLYRDVMLENFQNLASLGYPLHTPHLISQWEQEEDLQTVK

SEQ ID NO: 25 - protein, 41 aa, Artificial sequence
  Synthetic
LLTFRDVAIEFSLEEWQCLDTAQKNLYRNVMLENYRNLAFL

SEQ ID NO: 26 - protein, 80 aa, Artificial sequence
  Synthetic
GLLTFRDVAIEFSLEEWQCLDTAQKNLYRNVMLENYRNLAFLGIAVSKPDLIICLEKEKEPWNMKRDEMVDEPPGICPHF

SEQ ID NO: 27 - protein, 41 aa, Artificial sequence
  Synthetic
CVTFEDIAIYFSQDEWGLLDEAQRLLYLEVMLENFALVASL

SEQ ID NO: 28 - protein, 80 aa, Artificial sequence
  Synthetic
RAPTQVTVSPETHMDLTKGCVTFEDIAIYFSQDEWGLLDEAQRLLYLEVMLENFALVASLGCGHGTEDEETPSDQNVSVG

SEQ ID NO: 29 - protein, 41 aa, Artificial sequence
  Synthetic
SVTFEDVAVVFTDEEWSRLVPIQRDLYKEVMLENYNSIVSL

SEQ ID NO: 30 - protein, 80 aa, Artificial sequence
  Synthetic
AAVSPTTRCQESVTFEDVAVVFTDEEWSRLVPIQRDLYKEVMLENYNSIVSLGLPVPQPDVIFQLKRGDKPWMVDLHGSE

SEQ ID NO: 31 - protein, 41 aa, Artificial sequence
  Synthetic
KVTFEDVAIDFTQEEWDMMDTSKRKLYRDVMLENISHLVSL

SEQ ID NO: 32 - protein, 80 aa, Artificial sequence
  Synthetic
HSLEKVTFEDVAIDFTQEEWDMMDTSKRKLYRDVMLENISHLVSLGYQISKSYIILQLEQGKELWREGRVFLQDQNPDRE

SEQ ID NO: 33 - protein, 41 aa, Artificial sequence
  Synthetic
SVSFEDVAVNFTLEEWALLDSSQKKLYEDVMQETFKNLVCL

SEQ ID NO: 34 - protein, 80 aa, Artificial sequence
  Synthetic
DSVSFEDVAVNFTLEEWALLDSSQKKLYEDVMQETFKNLVCLGKKWEDQDIEDDHRNQGKNRRCHMVERLCESRRGSKCG

SEQ ID NO: 35 - protein, 41 aa, Artificial sequence
  Synthetic
LVTFKDVAIDFSQEEWQWMNPAQKRLYRSMMLENYQSLVSL

SEQ ID NO: 36 - protein, 80 aa, Artificial sequence
  Synthetic
NVEVVKVMPQDLVTFKDVAIDFSQEEWQWMNPAQKRLYRSMMLENYQSLVSLGLCISKPYVISLLEQGREPWEMTSEMTR

SEQ ID NO: 37 - protein, 41 aa, Artificial sequence
  Synthetic
SVTFKDVAIDFTLEEWRLMDPTQRNLHKDVMLENYRNLVSL

SEQ ID NO: 38 - protein, 80 aa, Artificial sequence
  Synthetic
TQPDEDLHLQAEETQLVKESVTFKDVAIDFTLEEWRLMDPTQRNLHKDVMLENYRNLVSLGLAVSKPDMISHLENGKGPW

SEQ ID NO: 39 - protein, 41 aa, Artificial sequence
  Synthetic
SFSFDDLSVDFTQKEWQLLDPSQKNLYKDVMLENYSSLVSL

SEQ ID NO: 40 - protein, 80 aa, Artificial sequence
  Synthetic
TMLQESFSFDDLSVDFTQKEWQLLDPSQKNLYKDVMLENYSSLVSLGYEVMKPDVIFKLEQGEEPWVGDGEIPSSDSPEV

SEQ ID NO: 41 - protein, 40 aa, Artificial sequence
  Synthetic
VVTFGDVAVHFSREEWQCLDPGQRALYREVMLENHSSVAG

SEQ ID NO: 42 - protein, 80 aa, Artificial sequence
  Synthetic
EVVTFGDVAVHFSREEWQCLDPGQRALYREVMLENHSSVAGLAGFLVFKPELISRLEQGEEPWVLDLQGAEGTEAPRTSK

SEQ ID NO: 43 - protein, 41 aa, Artificial sequence
  Synthetic
PMTFKDVAVEFTQEEWMMLDSAQRSLYRDVMLENYRNLTSV

SEQ ID NO: 44 - protein, 80 aa, Artificial sequence
  Synthetic
RNAEEERMIAVFLTTWLQEPMTFKDVAVEFTQEEWMMLDSAQRSLYRDVMLENYRNLTSVEYQLYRLTVISPLDQEEIRN

SEQ ID NO: 45 - protein, 41 aa, Artificial sequence
  Synthetic
FLAFGDVTVDFTQKEWRLLSPAQRALYREVTLENYSHLVSL

SEQ ID NO: 46 - protein, 80 aa, Artificial sequence
  Synthetic
GPQGARRQAFLAFGDVTVDFTQKEWRLLSPAQRALYREVTLENYSHLVSLGILHSKPELIRRLEQGEVPWGEERRRRPGP

SEQ ID NO: 47 - protein, 41 aa, Artificial sequence
  Synthetic
KLTFEDVAIDFTQEEWAMMDTSKRKLYRDVMLENISHLVSL

SEQ ID NO: 48 - protein, 80 aa, Artificial sequence
  Synthetic
HSLKKLTFEDVAIDFTQEEWAMMDTSKRKLYRDVMLENISHLVSLGYQISKSYIILQLEQGKELWREGRVFLQDQNPNRE

SEQ ID NO: 49 - protein, 41 aa, Artificial sequence
  Synthetic
LVTLRDVVINFSQEEWEYLDSAQRNLYWDVMMENYSNLLSL

SEQ ID NO: 50 - protein, 80 aa, Artificial sequence
  Synthetic
MPEVEFPDQFFTVLTMDHELVTLRDVVINFSQEEWEYLDSAQRNLYWDVMMENYSNLLSLDLESRNETKHLSVGKDIIQN

SEQ ID NO: 51 - protein, 41 aa, Artificial sequence
  Synthetic
PLTFRDVTIEFSLEEWQCLDTVQQNLYRDVMLENYRNLVFL

SEQ ID NO: 52 - protein, 80 aa, Artificial sequence
  Synthetic
PGAPGSLEMGPLTFRDVTIEFSLEEWQCLDTVQQNLYRDVMLENYRNLVFLGMAVFKPDLITCLKQGKEPWNMKRHEMVT

SEQ ID NO: 53 - protein, 41 aa, Artificial sequence
  Synthetic
YVTFEDVAVYFSQEEWRLLDDAQRLLYRNVMLENFTLLASL

SEQ ID NO: 54 - protein, 80 aa, Artificial sequence
  Synthetic
RDPAQVPVAADLLTDHEEGYVTFEDVAVYFSQEEWRLLDDAQRLLYRNVMLENFTLLASLGLASSKTHEITQLESWEEPF

SEQ ID NO: 55 - protein, 41 aa, Artificial sequence
  Synthetic
KVTFEDVAIDFTQEEWAMMDTSKRKLYRDVMLENISHLVSL

SEQ ID NO: 56 - protein, 80 aa, Artificial sequence
  Synthetic
HSLKKVTFEDVAIDFTQEEWAMMDTSKRKLYRDVMLENISHLVSLGYQISKSYIILQLEQGKELWREGREFLQDQNPDRE

SEQ ID NO: 57 - protein, 41 aa, Artificial sequence
  Synthetic
AVTFKDVAVVFSEEELQLLDLAQRKLYRDVMLENFRNVVSV

SEQ ID NO: 58 - protein, 80 aa, Artificial sequence
  Synthetic
TKSKEAVTFKDVAVVFSEEELQLLDLAQRKLYRDVMLENFRNVVSVGHQSTPDGLPQLEREEKLWMMKMATQRDNSSGAK

SEQ ID NO: 59 - protein, 41 aa, Artificial sequence
  Synthetic
QVTFSDVAIDFSHEEWACLDSAQRDLYKDVMVQNYENLVSV

SEQ ID NO: 60 - protein, 80 aa, Artificial sequence
  Synthetic
SQVTFSDVAIDFSHEEWACLDSAQRDLYKDVMVQNYENLVSVGLSVTKPYVIMLLEDGKEPWMMEKKLSKAYPFPLSHSV

SEQ ID NO: 61 - protein, 41 aa, Artificial sequence
  Synthetic
SLQFRDVAVEFSLEEWHCLDTAQQNLYRDVMLENYRHLVFL

SEQ ID NO: 62 - protein, 80 aa, Artificial sequence
  Synthetic
PGPLRSLEMESLQFRDVAVEFSLEEWHCLDTAQQNLYRDVMLENYRHLVFLGIIVSKPDLITCLEQGIKPLTMKRHEMIA

SEQ ID NO: 63 - protein, 40 aa, Artificial sequence
  Synthetic
SVTFEDVAVYFTQNQWASLDPAQRALYGEVMLENYANVAS

SEQ ID NO: 64 - protein, 80 aa, Artificial sequence
  Synthetic
LQTTWPQESVTFEDVAVYFTQNQWASLDPAQRALYGEVMLENYANVASLVAFPFPKPALISHLERGEAPWGPDPWDTEIL

SEQ ID NO: 65 - protein, 41 aa, Artificial sequence
  Synthetic
TVSFADVAVYFSPEEWGCLRPAQRALYRDVMQETYGHLGAL

SEQ ID NO: 66 - protein, 80 aa, Artificial sequence
  Synthetic
APLLAPRPGETRPGCRKPGTVSFADVAVYFSPEEWGCLRPAQRALYRDVMQETYGHLGALGFPGPKPALISWMEQESEAW

SEQ ID NO: 67 - protein, 41 aa, Artificial sequence
  Synthetic
SVSFKDVTVGFTQEEWQHLDPSQRALYRDVMLENYSNLVSV

SEQ ID NO: 68 - protein, 80 aa, Artificial sequence
  Synthetic
NKVEQKSQESVSFKDVTVGFTQEEWQHLDPSQRALYRDVMLENYSNLVSVGYCVHKPEVIFRLQQGEEPWKQEEEFPSQS

SEQ ID NO: 69 - protein, 41 aa, Artificial sequence
  Synthetic
LVTFEDVSMDFSQEEWELLEPAQKNLYREVMLENYRNVVSL

SEQ ID NO: 70 - protein, 80 aa, Artificial sequence
  Synthetic
CFSQEERMAAGYLPRWSQELVTFEDVSMDFSQEEWELLEPAQKNLYREVMLENYRNVVSLEALKNQCTDVGIKEGPLSPA

SEQ ID NO: 71 - protein, 41 aa, Artificial sequence
  Synthetic
SVAFEDVAVNFTQEEWALLDPSQKNLYREVMQETLRNLTSI

SEQ ID NO: 72 - protein, 80 aa, Artificial sequence
  Synthetic
DSVAFEDVAVNFTQEEWALLDPSQKNLYREVMQETLRNLTSIGKKWNNQYIEDEHQNPRRNLRRLIGERLSESKESHQHG

SEQ ID NO: 73 - protein, 41 aa, Artificial sequence
  Synthetic
QVNFEDVFVYFSQEEWVLLDEAQRLLYRDVMLENFALMASL

SEQ ID NO: 74 - protein, 80 aa, Artificial sequence
  Synthetic
MGPAQVPMNSEVIVDPIQGQVNFEDVFVYFSQEEWVLLDEAQRLLYRDVMLENFALMASLGHTSFMSHIVASLVMGSEPW

SEQ ID NO: 75 - protein, 41 aa, Artificial sequence
  Synthetic
AMTFKDVAVVFTEEELGLLDLAQRKLYRDVMLENFRNLLSV

SEQ ID NO: 76 - protein, 80 aa, Artificial sequence
  Synthetic
TTFKEAMTFKDVAVVFTEEELGLLDLAQRKLYRDVMLENFRNLLSVGHQAFHRDTFHFLREEKIWMMKTAIQREGNSGDK

SEQ ID NO: 77 - protein, 41 aa, Artificial sequence
  Synthetic
AVTFKDVIVDFTQEEWKQLDPGQRDLFRDVTLENYTHLVSI

SEQ ID NO: 78 - protein, 80 aa, Artificial sequence
  Synthetic
DSTLLQGGHNLLSSASFQEAVTFKDVIVDFTQEEWKQLDPGQRDLFRDVTLENYTHLVSIGLQVSKPDVISQLEQGTEPW

SEQ ID NO: 79 - protein, 41 aa, Artificial sequence
  Synthetic
SVCFEDVAMAFTQEEWEQLDLAQRTLYREVTLETWEHIVSL

SEQ ID NO: 80 - protein, 80 aa, Artificial sequence
  Synthetic
EARSMLVPPQASVCFEDVAMAFTQEEWEQLDLAQRTLYREVTLETWEHIVSLGLFLSKSDVISQLEQEEDLCRAEQEAPR

SEQ ID NO: 81 - protein, 41 aa, Artificial sequence
  Synthetic
SVVFEDVAVDFTLEEWALLDSAQRDLYRDVMLETFRNLASV

SEQ ID NO: 82 - protein, 80 aa, Artificial sequence
  Synthetic
DSVVFEDVAVDFTLEEWALLDSAQRDLYRDVMLETFRNLASVDDGTQFKANGSVSLQDMYGQEKSKEQTIPNFTGNNSCA

SEQ ID NO: 83 - protein, 41 aa, Artificial sequence
  Synthetic
LVTFRDVAIDFSQEEWECLDPAQRDLYVDVMLENYSNLVSL

SEQ ID NO: 84 - protein, 80 aa, Artificial sequence
  Synthetic
EESHGALISSCNSRTMTDGLVTFRDVAIDFSQEEWECLDPAQRDLYVDVMLENYSNLVSLDLESKTYETKKIFSENDIFE

SEQ ID NO: 85 - protein, 41 aa, Artificial sequence
  Synthetic
HVTFEDIAVYFSQEEWGLLDEAQRCLYHDVMLENFSLMASV

SEQ ID NO: 86 - protein, 80 aa, Artificial sequence
  Synthetic
VITPQIPMVTEEFVKPSQGHVTFEDIAVYFSQEEWGLLDEAQRCLYHDVMLENFSLMASVGCLHGIEAEEAPSEQTLSAQ

SEQ ID NO: 87 - protein, 41 aa, Artificial sequence
  Synthetic
SVTFEDVAVYFSWEEWDLLDEAQKHLYFDVMLENFALTSSL

SEQ ID NO: 88 - protein, 80 aa, Artificial sequence
  Synthetic
VQLRPQTRMATALRDPASGSVTFEDVAVYFSWEEWDLLDEAQKHLYFDVMLENFALTSSLGCWCGVEHEETPSEQRISGE

SEQ ID NO: 89 - protein, 41 aa, Artificial sequence
  Synthetic
PLQFRDVAIEFSLEEWHCLDAAQRNLYRDVMLENYRNLIFL

SEQ ID NO: 90 - protein, 80 aa, Artificial sequence
  Synthetic
GPLQFRDVAIEFSLEEWHCLDAAQRNLYRDVMLENYRNLIFLGIVVSKPNLITCLEQGKKPLTMKRHEMIAKPPVMYSHF

SEQ ID NO: 91 - protein, 41 aa, Artificial sequence
  Synthetic
SLTLEDVAVDFTWEEWQFLSPAQKDLYRDVMLENYSNLVAV

SEQ ID NO: 92 - protein, 80 aa, Artificial sequence
  Synthetic
MQAQESLTLEDVAVDFTWEEWQFLSPAQKDLYRDVMLENYSNLVAVGYQASKPDALSKLERGEETCTTEDEIYSRICSEI

SEQ ID NO: 93 - protein, 41 aa, Artificial sequence
  Synthetic
PLQFRDVAIEFSLEEWHCLDTAQRNLYRDVMLENYRNLVFL

SEQ ID NO: 94 - protein, 80 aa, Artificial sequence
  Synthetic
GPLQFRDVAIEFSLEEWHCLDTAQRNLYRDVMLENYRNLVFLGIVVSKPDLVTCLEQGKKPLTMERHEMIAKPPVMSSHF

SEQ ID NO: 95 - protein, 41 aa, Artificial sequence
  Synthetic
AVTFKDVAVAFTEEELGLLGPAQRKLYRDVMVENFRNLLSV

SEQ ID NO: 96 - protein, 80 aa, Artificial sequence
  Synthetic
NMFKEAVTFKDVAVAFTEEELGLLGPAQRKLYRDVMVENFRNLLSVGHPPFKQDVSPIERNEQLWIMTTATRRQGNLGEK

SEQ ID NO: 97 - protein, 41 aa, Artificial sequence
  Synthetic
ALTFRDVAIEFSLEEWQCLDTEQQNLYRNVMLDNYRNLVFL

SEQ ID NO: 98 - protein, 80 aa, Artificial sequence
  Synthetic
GALTFRDVAIEFSLEEWQCLDTEQQNLYRNVMLDNYRNLVFLGIAVSKPDLITCLEQEKEPWNLKTHDMVAKPPVICSHI

SEQ ID NO: 99 - protein, 41 aa, Artificial sequence
  Synthetic
SVSFRDVAIDFSREEWRHLDPSQRNLYRDVMLETYSHLLSV

SEQ ID NO: 100 - protein, 80 aa, Artificial sequence
  Synthetic
SPQKSSALAPEDHGSSYEGSVSFRDVAIDFSREEWRHLDPSQRNLYRDVMLETYSHLLSVGYQVPEAEVVMLEQGKEPWA

SEQ ID NO: 101 - protein, 41 aa, Artificial sequence
  Synthetic
LLTFRDVAIEFSPEEWKCLDPAQQNLYRDVMLENYRNLISL

SEQ ID NO: 102 - protein, 80 aa, Artificial sequence
  Synthetic
ELLTFRDVAIEFSPEEWKCLDPAQQNLYRDVMLENYRNLISLGVAISNPDLVIYLEQRKEPYKVKIHETVAKHPAVCSHF

SEQ ID NO: 103 - protein, 41 aa, Artificial sequence
  Synthetic
PLKFRDVAIEFSLEEWQCLDTIQQNLYRNVMLENYRNLVFL

SEQ ID NO: 104 - protein, 80 aa, Artificial sequence
  Synthetic
EPLKFRDVAIEFSLEEWQCLDTIQQNLYRNVMLENYRNLVFLGIVVSKPDLITCLEQEKEPWTRKRHRMVAEPPVICSHF

SEQ ID NO: 105 - protein, 41 aa, Artificial sequence
  Synthetic
PITFGDLAIYFSQEEWEWLSPIQKDLYEDVMLENYRNLVSL

SEQ ID NO: 106 - protein, 80 aa, Artificial sequence
  Synthetic
PSARGKSKSKAPITFGDLAIYFSQEEWEWLSPIQKDLYEDVMLENYRNLVSLGLSFRRPNVITLLEKGKAPWMVEPVRRR

SEQ ID NO: 107 - protein, 41 aa, Artificial sequence
  Synthetic
SLTLEDVAVDFTWEEWQFLSPAQKDLYRDVMLENYSNLVSV

SEQ ID NO: 108 - protein, 80 aa, Artificial sequence
  Synthetic
TKAQESLTLEDVAVDFTWEEWQFLSPAQKDLYRDVMLENYSNLVSVGYQAGKPDALTKLEQGEPLWTLEDEIHSPAHPEI

SEQ ID NO: 109 - protein, 41 aa, Artificial sequence
  Synthetic
SVTFTDVAIDFSQDEWEWLNLAQRSLYKKVMLENYRNLVSV

SEQ ID NO: 110 - protein, 80 aa, Artificial sequence
  Synthetic
SQEEVEVAGIKLCKAMSLGSVTFTDVAIDFSQDEWEWLNLAQRSLYKKVMLENYRNLVSVGLCISKPDVISLLEQEKDPW

SEQ ID NO: 111 - protein, 41 aa, Artificial sequence
  Synthetic
SVSFKDVTVDFSRDEWQQLDLAQKSLYREVMLENYFNLISV

SEQ ID NO: 112 - protein, 80 aa, Artificial sequence
  Synthetic
TKSLESVSFKDVTVDFSRDEWQQLDLAQKSLYREVMLENYFNLISVGCQVPKPEVIFSLEQEEPCMLDGEIPSQSRPDGD

SEQ ID NO: 113 - protein, 41 aa, Artificial sequence
  Synthetic
TLTFRDVAIEFSLEEWECLNPAQQNLYMNVMLENYKNLVFL

SEQ ID NO: 114 - protein, 80 aa, Artificial sequence
  Synthetic
SGCPGAERNLLVYSYFEKETLTFRDVAIEFSLEEWECLNPAQQNLYMNVMLENYKNLVFLGVAVSKQDPVTCLEQEKEPW

SEQ ID NO: 115 - protein, 41 aa, Artificial sequence
  Synthetic
SVSFKDVTVDFTQEEWQQLDPAQKALYRDVMLENYCHFVSV

SEQ ID NO: 116 - protein, 80 aa, Artificial sequence
  Synthetic
PLQGSVSFKDVTVDFTQEEWQQLDPAQKALYRDVMLENYCHFVSVGFHMAKPDMIRKLEQGEELWTQRIFPSYSYLEEDG

SEQ ID NO: 117 - protein, 41 aa, Artificial sequence
  Synthetic
LLTFRDVAIEFSLEEWQHLDIAQQNLYRNVMLENYRNLAFL

SEQ ID NO: 118 - protein, 80 aa, Artificial sequence
  Synthetic
PGPPRSLEMGLLTFRDVAIEFSLEEWQHLDIAQQNLYRNVMLENYRNLAFLGIAVSKPDLITCLEQGKEPWNMKRHEMVD

SEQ ID NO: 119 - protein, 41 aa, Artificial sequence
  Synthetic
SVAFEDVAVNFTQEEWALLDPSQKNLYRDVMQETFRNLASI

SEQ ID NO: 120 - protein, 80 aa, Artificial sequence
  Synthetic
SGHPGSWEMNSVAFEDVAVNFTQEEWALLDPSQKNLYRDVMQETFRNLASIGNKGEDQSIEDQYKNSSRNLRHIISHSGN

SEQ ID NO: 121 - protein, 40 aa, Artificial sequence
  Synthetic
SITFGDVAIDFSHQEWEYLSLVQKTLYQEVMMENYDNLVS

SEQ ID NO: 122 - protein, 80 aa, Artificial sequence
  Synthetic
SYGSITFGDVAIDFSHQEWEYLSLVQKTLYQEVMMENYDNLVSLAGHSVSKPDLITLLEQGKEPWMIVREETRGECTDLD

SEQ ID NO: 123 - protein, 41 aa, Artificial sequence
  Synthetic
SVTFQDVAVDFTEKEWPLLDSSQRKLYKDVMLENYSNLTSL

SEQ ID NO: 124 - protein, 80 aa, Artificial sequence
  Synthetic
DLFVCSGLEPHTPSVGSQESVTFQDVAVDFTEKEWPLLDSSQRKLYKDVMLENYSNLTSLGYQVGKPSLISHLEQEEEPR

SEQ ID NO: 125 - protein, 40 aa, Artificial sequence
  Synthetic
PVTFEDVAVYFTQNEWASLDSVQRALYREVMLENYANVAS

SEQ ID NO: 126 - protein, 80 aa, Artificial sequence
  Synthetic
FQTAWRQEPVTFEDVAVYFTQNEWASLDSVQRALYREVMLENYANVASLAFPFTTPVLVSQLEQGELPWGLDPWEPMGRE

SEQ ID NO: 127 - protein, 41 aa, Artificial sequence
  Synthetic
LLTFRDVAIEFSPEEWKCLDPDQQNLYRDVMLENYRNLVSL

SEQ ID NO: 128 - protein, 80 aa, Artificial sequence
  Synthetic
ELLTFRDVAIEFSPEEWKCLDPDQQNLYRDVMLENYRNLVSLGVAISNPDLVTCLEQRKEPYNVKIHKIVARPPAMCSHF

SEQ ID NO: 129 - protein, 41 aa, Artificial sequence
  Synthetic
LVMFEDVTVYFSREEWGLLNVTQKGLYRDVMLENFALVSSL

SEQ ID NO: 130 - protein, 80 aa, Artificial sequence
  Synthetic
AGEAEAQLDPSLQGLVMFEDVTVYFSREEWGLLNVTQKGLYRDVMLENFALVSSLGLAPSRSPVFTQLEDDEQSWVPSWV

SEQ ID NO: 131 - protein, 41 aa, Artificial sequence
  Synthetic
LVTFRDVAIDFSQKEWECLDTTQRKLYRDVMLENYNNLVSL

SEQ ID NO: 132 - protein, 80 aa, Artificial sequence
  Synthetic
AHALVTFRDVAIDFSQKEWECLDTTQRKLYRDVMLENYNNLVSLGYSGSKPDVITLLEQGKEPCVVARDVTGRQCPGLLS

SEQ ID NO: 133 - protein, 41 aa, Artificial sequence
  Synthetic
LLTFEDVAVYFSEEEWQLLNPLEKTLYNDVMQDIYETVISL

SEQ ID NO: 134 - protein, 80 aa, Artificial sequence
  Synthetic
KRIKHWKMASKLILPESLSLLTFEDVAVYFSEEEWQLLNPLEKTLYNDVMQDIYETVISLGLKLKNDTGNDHPISVSTSE

SEQ ID NO: 135 - protein, 41 aa, Artificial sequence
  Synthetic
SVVFEDVAVDFTLEEWALLDSAQRDLYRDVMLETFQNLASV

SEQ ID NO: 136 - protein, 80 aa, Artificial sequence
  Synthetic
DSVVFEDVAVDFTLEEWALLDSAQRDLYRDVMLETFQNLASVDDETQFKASGSVSQQDIYGEKIPKESKIATFTRNVSWA

SEQ ID NO: 137 - protein, 41 aa, Artificial sequence
  Synthetic
SVSFQDVTVEFTREEWQHLGPVERTLYRDVMLENYSHLISV

SEQ ID NO: 138 - protein, 80 aa, Artificial sequence
  Synthetic
NMSQASVSFQDVTVEFTREEWQHLGPVERTLYRDVMLENYSHLISVGYCITKPKVISKLEKGEEPWSLEDEFLNQRYPGY

SEQ ID NO: 139 - protein, 41 aa, Artificial sequence
  Synthetic
SVTFQDVAVDFTAEEWQLLDCAERTLYWDVMLENYRNLISV

SEQ ID NO: 140 - protein, 80 aa, Artificial sequence
  Synthetic
ISFQESVTFQDVAVDFTAEEWQLLDCAERTLYWDVMLENYRNLISVGCPITKTKVILKVEQGQEPWMVEGANPHESSPES

SEQ ID NO: 141 - protein, 41 aa, Artificial sequence
  Synthetic
PVSFKDVAVDFTQEEWQQLDPDEKITYRDVMLENYSHLVSV

SEQ ID NO: 142 - protein, 80 aa, Artificial sequence
  Synthetic
NTLQGPVSFKDVAVDFTQEEWQQLDPDEKITYRDVMLENYSHLVSVGYDTTKPNVIIKLEQGEEPWIMGGEFPCQHSPEA

SEQ ID NO: 143 - protein, 41 aa, Artificial sequence
  Synthetic
PVMFRDVSIDFSQEEWECLDADQMNLYKEVMLENFSNLVSV

SEQ ID NO: 144 - protein, 80 aa, Artificial sequence
  Synthetic
HPEEEERMHDELLQAVSKGPVMFRDVSIDFSQEEWECLDADQMNLYKEVMLENFSNLVSVGLSNSKPAVISLLEQGKEPW

SEQ ID NO: 145 - protein, 39 aa, Artificial sequence
  Synthetic
LFRDVAIVFSQEEWQWLAPAQRDLYRDVMLETYSNLVSL

SEQ ID NO: 146 - protein, 80 aa, Artificial sequence
  Synthetic
SLGSELFRDVAIVFSQEEWQWLAPAQRDLYRDVMLETYSNLVSLGLAVSKPDVISFLEQGKEPWMVERVVSGGLCPVLES

SEQ ID NO: 147 - protein, 40 aa, Artificial sequence
  Synthetic
MVTFKDVAVVFTEEELGLLDSVQRKLYRDVMLENFRNLLL

SEQ ID NO: 148 - protein, 80 aa, Artificial sequence
  Synthetic
TKFQEMVTFKDVAVVFTEEELGLLDSVQRKLYRDVMLENFRNLLLVAHQPFKPDLISQLEREEKLLMVETETPRDGCSGR

SEQ ID NO: 149 - protein, 41 aa, Artificial sequence
  Synthetic
LLTFRDIAIEFSLAEWQCLDHAQQNLYRDVMLENYRNLVSL

SEQ ID NO: 150 - protein, 80 aa, Artificial sequence
  Synthetic
AKRPGPPGSREMGLLTFRDIAIEFSLAEWQCLDHAQQNLYRDVMLENYRNLVSLGIAVSKPDLITCLEQNKEPQNIKRNE

SEQ ID NO: 151 - protein, 41 aa, Artificial sequence
  Synthetic
FVAFRDVAVYFTQEEWRLLSPAQRTLHREVMLETYNHLVSL

SEQ ID NO: 152 - protein, 80 aa, Artificial sequence
  Synthetic
TCMVHRQTMSCSGAGGITAFVAFRDVAVYFTQEEWRLLSPAQRTLHREVMLETYNHLVSLEIPSSKPKLIAQLERGEAPW

SEQ ID NO: 153 - protein, 41 aa, Artificial sequence
  Synthetic
SITLEDVAVDFTWEEWQLLGAAQKDLYRDVMLENYSNLVAV

SEQ ID NO: 154 - protein, 80 aa, Artificial sequence
  Synthetic
IQAQESITLEDVAVDFTWEEWQLLGAAQKDLYRDVMLENYSNLVAVGYQASKPDALFKLEQGEQLWTIEDGIHSGACSDI

SEQ ID NO: 155 - protein, 41 aa, Artificial sequence
  Synthetic
HLTFRDVAIEFSQAEWKCLDPAQRALYKDVMLENYRNLVSL

SEQ ID NO: 156 - protein, 80 aa, Artificial sequence
  Synthetic
AQKRRKRKAKESGMALPQGHLTFRDVAIEFSQAEWKCLDPAQRALYKDVMLENYRNLVSLGISLPDLNINSMLEQRREPW

SEQ ID NO: 157 - protein, 40 aa, Artificial sequence
  Synthetic
CVTFEDVAIYFSQEEWGLLDEAQRLLYRDVMLENFALITA

SEQ ID NO: 158 - protein, 80 aa, Artificial sequence
  Synthetic
DSTSVPVTAEAKLMGFTQGCVTFEDVAIYFSQEEWGLLDEAQRLLYRDVMLENFALITALVCWHGMEDEETPEQSVSVEG

SEQ ID NO: 159 - protein, 41 aa, Artificial sequence
  Synthetic
PLTFRDVKIEFSLEEWQCLDTAQRNLYRDVMLENYRNLVFL

SEQ ID NO: 160 - protein, 80 aa, Artificial sequence
  Synthetic
GPLTFRDVKIEFSLEEWQCLDTAQRNLYRDVMLENYRNLVFLGIAVSKPDLITWLEQGKEPWNLKRHEMVDKTPVMCSHF

SEQ ID NO: 161 - protein, 40 aa, Artificial sequence
  Synthetic
PLTFRDVAIEFSLEEWQCLDSAQQGLYRKVMLENYRNLVF

SEQ ID NO: 162 - protein, 80 aa, Artificial sequence
  Synthetic
SGCPGAERSLLVQSYFEKGPLTFRDVAIEFSLEEWQCLDSAQQGLYRKVMLENYRNLVFLAGIALTKPDLITCLEQGKEP

SEQ ID NO: 163 - protein, 41 aa, Artificial sequence
  Synthetic
VLTFRDVAVEFSPEEWECLDSAQQRLYRDVMLENYGNLVSL

SEQ ID NO: 164 - protein, 80 aa, Artificial sequence
  Synthetic
GVLTFRDVAVEFSPEEWECLDSAQQRLYRDVMLENYGNLVSLGLAIFKPDLMTCLEQRKEPWKVKRQEAVAKHPAGSFHF

SEQ ID NO: 165 - protein, 41 aa, Artificial sequence
  Synthetic
SVSFKDVAVDFTQEEWGQLDSPQRALYRDVMLENYQNLLAL

SEQ ID NO: 166 - protein, 80 aa, Artificial sequence
  Synthetic
KENLEDISGWGLPEARSKESVSFKDVAVDFTQEEWGQLDSPQRALYRDVMLENYQNLLALGPPLHKPDVISHLERGEEPW

SEQ ID NO: 167 - protein, 52 aa, Artificial sequence
  Synthetic
EPERIIGATDSSGELMFLMKWKNSDEADLVPAKEANVKCPQVVISFYEERLT

SEQ ID NO: 168 - protein, 80 aa, Artificial sequence
  Synthetic
EESEKPRGFARGLEPERIIGATDSSGELMFLMKWKNSDEADLVPAKEANVKCPQVVISFYEERLTWHSYPSEDDDKKDDK

SEQ ID NO: 169 - protein, 40 aa, Artificial sequence
  Synthetic
SVALEDVAVNFTREEWALLGPCQKNLYKDVMQETIRNLDC

SEQ ID NO: 170 - protein, 80 aa, Artificial sequence
  Synthetic
ASVALEDVAVNFTREEWALLGPCQKNLYKDVMQETIRNLDCVVMKWKDQNIEDQYRYPRKNLRCRMLERFVESKDGTQCG

SEQ ID NO: 171 - protein, 41 aa, Artificial sequence
  Synthetic
LLTFRDVAIEFSLEEWKCLDLAQQNLYRDVMLENYRNLFSV

SEQ ID NO: 172 - protein, 80 aa, Artificial sequence
  Synthetic
TLLTFRDVAIEFSLEEWKCLDLAQQNLYRDVMLENYRNLFSVGLTVCKPGLITCLEQRKEPWNVKRQEAADGHPEMGFHH

SEQ ID NO: 173 - protein, 41 aa, Artificial sequence
  Synthetic
FVAFEDVAIYFSQEEWELLDEMQRLLYRDVMLENFAVMASL

SEQ ID NO: 174 - protein, 80 aa, Artificial sequence
  Synthetic
AAALRAPTQQVFVAFEDVAIYFSQEEWELLDEMQRLLYRDVMLENFAVMASLGCWCGAVDEGTPSAESVSVEELSQGRTP

SEQ ID NO: 175 - protein, 41 aa, Artificial sequence
  Synthetic
SVSFQDVTVEFSQEEWQHMGPVERTLYRDVMLENYSHLVSV

SEQ ID NO: 176 - protein, 80 aa, Artificial sequence
  Synthetic
NTFQASVSFQDVTVEFSQEEWQHMGPVERTLYRDVMLENYSHLVSVGYCFTKPELIFTLEQGEDPWLLEKEKGFLSRNSP

SEQ ID NO: 177 - protein, 41 aa, Artificial sequence
  Synthetic
SVAFEDVSVSFSQEEWALLAPSQKKLYRDVMQETFKNLASI

SEQ ID NO: 178 - protein, 80 aa, Artificial sequence
  Synthetic
DSVAFEDVSVSFSQEEWALLAPSQKKLYRDVMQETFKNLASIGEKWEDPNVEDQHKNQGRNLRSHTGERLCEGKEGSQCA

SEQ ID NO: 179 - protein, 41 aa, Artificial sequence
  Synthetic
LVTFADVAIDFSQEEWACLNSAQRDLYWDVMLENYSNLVSL

SEQ ID NO: 180 - protein, 80 aa, Artificial sequence
  Synthetic
AQGLVTFADVAIDFSQEEWACLNSAQRDLYWDVMLENYSNLVSLDLESAYENKSLPTEKNIHEIRASKRNSDRRSKSLGR

SEQ ID NO: 181 - protein, 41 aa, Artificial sequence
  Synthetic
PVTFRDVAVFFSQDEWLHLDSAQRALYREVMLENYSSLVSL

SEQ ID NO: 182 - protein, 80 aa, Artificial sequence
  Synthetic
AVDLLSAQEPVTFRDVAVFFSQDEWLHLDSAQRALYREVMLENYSSLVSLGIPFSMPKLIHQLQQGEDPCMVEREVPSDT

SEQ ID NO: 183 - protein, 41 aa, Artificial sequence
  Synthetic
SVSFEDVAVDFTRQEWHRLDPAQRTMHKDVMLETYSNLASV

SEQ ID NO: 184 - protein, 80 aa, Artificial sequence
  Synthetic
SPQRFPALIPGEPGRSFEGSVSFEDVAVDFTRQEWHRLDPAQRTMHKDVMLETYSNLASVGLCVAKPEMIFKLERGEELW

SEQ ID NO: 185 - protein, 41 aa, Artificial sequence
  Synthetic
VLTFRDVAVEFSPEEWECLDSAQQRLYRDVMLENYGNLFSL

SEQ ID NO: 186 - protein, 80 aa, Artificial sequence
  Synthetic
RVLTFRDVAVEFSPEEWECLDSAQQRLYRDVMLENYGNLFSLGLAIFKPDLITYLEQRKEPWNARRQKTVAKHPAGSLHF

SEQ ID NO: 187 - protein, 41 aa, Artificial sequence
  Synthetic
LVTFKDVAVTFTREEWRQLDLAQRTLYREVMLETCGLLVSL

SEQ ID NO: 188 - protein, 80 aa, Artificial sequence
  Synthetic
AETKDAAQMLVTFKDVAVTFTREEWRQLDLAQRTLYREVMLETCGLLVSLGHRVPKPELVHLLEHGQELWIVKRGLSHAT

SEQ ID NO: 189 - protein, 41 aa, Artificial sequence
  Synthetic
PVSFKDVVVGFTQEEWHRLSPAQRALYRDVMLETYSNLVSV

SEQ ID NO: 190 - protein, 80 aa, Artificial sequence
  Synthetic
IEYQIPVSFKDVVVGFTQEEWHRLSPAQRALYRDVMLETYSNLVSVGYEGTKPDVILRLEQEEAPWIGEAACPGCHCWED

SEQ ID NO: 191 - protein, 41 aa, Artificial sequence
  Synthetic
AVTFKDVAVAFTEEELGLLDSAQRKLYRDVMLENFRNLVSV

SEQ ID NO: 192 - protein, 80 aa, Artificial sequence
  Synthetic
TKFQEAVTFKDVAVAFTEEELGLLDSAQRKLYRDVMLENFRNLVSVGHQSFKPDMISQLEREEKLWMKELQTQRGKHSGD

SEQ ID NO: 193 - protein, 41 aa, Artificial sequence
  Synthetic
PVTFRDVAVDFTQEEWGQLDPTQRILYRDVMLETFGHLLSI

SEQ ID NO: 194 - protein, 80 aa, Artificial sequence
  Synthetic
DEGVAGVMSVGPPAARLQEPVTFRDVAVDFTQEEWGQLDPTQRILYRDVMLETFGHLLSIGPELPKPEVISQLEQGTELW

SEQ ID NO: 195 - protein, 41 aa, Artificial sequence
  Synthetic
PLTFMDVAIEFSVEEWQCLDTAQQNLYRNVMLENYRNLVFL

SEQ ID NO: 196 - protein, 80 aa, Artificial sequence
  Synthetic
GPLTFMDVAIEFSVEEWQCLDTAQQNLYRNVMLENYRNLVFLGIAVSKPDLITCLEQGKEPWNMERHEMVAKPPGMCCYF

SEQ ID NO: 197 - protein, 41 aa, Artificial sequence
  Synthetic
LVTFRDVAIDFSRQEWEYLDPNQRDLYRDVMLENYRNLVSL

SEQ ID NO: 198 - protein, 80 aa, Artificial sequence
  Synthetic
HQVGLIRSYNSKTMTCFQELVTFRDVAIDFSRQEWEYLDPNQRDLYRDVMLENYRNLVSLGGHSISKPVVVDLLERGKEP

SEQ ID NO: 199 - protein, 41 aa, Artificial sequence
  Synthetic
SLSFEDVAVGFTREEWQFLDQSQKVLYKEVMLENYINLVSI

SEQ ID NO: 200 - protein, 80 aa, Artificial sequence
  Synthetic
NATIVMSVRREQGSSSGEGSLSFEDVAVGFTREEWQFLDQSQKVLYKEVMLENYINLVSIGYRGTKPDSLFKLEQGEPPG

SEQ ID NO: 201 - protein, 41 aa, Artificial sequence
  Synthetic
LLSFEDVAMYFTREEWGHLNWGQKDLYRDVMLENYRNMVLL

SEQ ID NO: 202 - protein, 80 aa, Artificial sequence
  Synthetic
FPPARGKELLSFEDVAMYFTREEWGHLNWGQKDLYRDVMLENYRNMVLLGFQFPKPEMICQLENWDEQWILDLPRTGNRK

SEQ ID NO: 203 - protein, 41 aa, Artificial sequence
  Synthetic
LLTFKDVAIEFSPEEWKCLDTSQQNLYRDVMLENYRNLVSL

SEQ ID NO: 204 - protein, 80 aa, Artificial sequence
  Synthetic
ELLTFKDVAIEFSPEEWKCLDTSQQNLYRDVMLENYRNLVSLGVSISNPDLVTSLEQRKEPYNLKIHETAARPPAVCSHF

SEQ ID NO: 205 - protein, 41 aa, Artificial sequence
  Synthetic
LVSFKDVAVDFTQEEWQQLDPSQRTLYRDVMLENYSHLVSM

SEQ ID NO: 206 - protein, 80 aa, Artificial sequence
  Synthetic
MKSQGLVSFKDVAVDFTQEEWQQLDPSQRTLYRDVMLENYSHLVSMGYPVSKPDVISKLEQGEEPWIIKGDISNWIYPDE

SEQ ID NO: 207 - protein, 41 aa, Artificial sequence
  Synthetic
SVMFSDVSIDFSQEEWDCLDPVQRDLYRDVMLENYGNLVSM

SEQ ID NO: 208 - protein, 80 aa, Artificial sequence
  Synthetic
AEGSVMFSDVSIDFSQEEWDCLDPVQRDLYRDVMLENYGNLVSMGLYTPKPQVISLLEQGKEPWMVGRELTRGLCSDLES

SEQ ID NO: 209 - protein, 41 aa, Artificial sequence
  Synthetic
PLTFTDVAIEFSLEEWQCLDTAQQNLYRNVMLENYRNLVFL

SEQ ID NO: 210 - protein, 80 aa, Artificial sequence
  Synthetic
GPLTFTDVAIEFSLEEWQCLDTAQQNLYRNVMLENYRNLVFLGIAVSKPDLITCLEKEKEPCKMKRHEMVDEPPVVCSHF

SEQ ID NO: 211 - protein, 41 aa, Artificial sequence
  Synthetic
LFTFKDVAIEFSQEEWECLDPAQRALYRDVMLENYRNLLSL

SEQ ID NO: 212 - protein, 80 aa, Artificial sequence
  Synthetic
ALSQGLFTFKDVAIEFSQEEWECLDPAQRALYRDVMLENYRNLLSLDEDNIPPEDDISVGFTSKGLSPKENNKEELYHLV

SEQ ID NO: 213 - protein, 41 aa, Artificial sequence
  Synthetic
LVMFQDLSIDFSQEEWECLDAAQKDLYRDVMMENYSSLVSL

SEQ ID NO: 214 - protein, 80 aa, Artificial sequence
  Synthetic
NMEGLVMFQDLSIDFSQEEWECLDAAQKDLYRDVMMENYSSLVSLGLSIPKPDVISLLEQGKEPWMVSRDVLGGWCRDSE

SEQ ID NO: 215 - protein, 41 aa, Artificial sequence
  Synthetic
SVTFKDVAILFTQEEWGQLSPAQRALYRDVMLENYSNLVSL

SEQ ID NO: 216 - protein, 80 aa, Artificial sequence
  Synthetic
AVSHLPTMVQESVTFKDVAILFTQEEWGQLSPAQRALYRDVMLENYSNLVSLGLLGPKPDTFSQLEKREVWMPEDTPGGF

SEQ ID NO: 217 - protein, 41 aa, Artificial sequence
  Synthetic
PLTIRDVTVEFSLEEWHCLDTAQQNLYRDVMLENYRNLVFL

SEQ ID NO: 218 - protein, 80 aa, Artificial sequence
  Synthetic
GPLTIRDVTVEFSLEEWHCLDTAQQNLYRDVMLENYRNLVFLGIAVSKPDLITCLEQGKEPCNMKRHEMVAKPPVMCSHI

SEQ ID NO: 219 - protein, 41 aa, Artificial sequence
  Synthetic
SVTFDDVAVTFTKEEWGQLDLAQRTLYQEVMLENCGLLVSL

SEQ ID NO: 220 - protein, 80 aa, Artificial sequence
  Synthetic
AAAVLTDRAQVSVTFDDVAVTFTKEEWGQLDLAQRTLYQEVMLENCGLLVSLGCPVPKAELICHLEHGQEPWTRKEDLSQ

SEQ ID NO: 221 - protein, 41 aa, Artificial sequence
  Synthetic
SVMFSDVSIDFSPEEWEYLDLEQKDLYRDVMLENYSNLVSL

SEQ ID NO: 222 - protein, 80 aa, Artificial sequence
  Synthetic
ALRSVMFSDVSIDFSPEEWEYLDLEQKDLYRDVMLENYSNLVSLGCFISKPDVISSLEQGKEPWKVVRKGRRQYPDLETK

SEQ ID NO: 223 - protein, 41 aa, Artificial sequence
  Synthetic
SVTFRDVAIDFSQEEWEFLDPAQRDLYRDVMWENYSNFISL

SEQ ID NO: 224 - protein, 80 aa, Artificial sequence
  Synthetic
AHGSVTFRDVAIDFSQEEWEFLDPAQRDLYRDVMWENYSNFISLGPSISKPDVITLLDEERKEPGMVVREGTRRYCPDLE

SEQ ID NO: 225 - protein, 41 aa, Artificial sequence
  Synthetic
PLTFGDVAVAFTRIEWRHLDAAQRALYRDVMLENYGNLVSV

SEQ ID NO: 226 - protein, 80 aa, Artificial sequence
  Synthetic
APRAQIQGPLTFGDVAVAFTRIEWRHLDAAQRALYRDVMLENYGNLVSVGLLSSKPKLITQLEQGAEPWTEVREAPSGTH

SEQ ID NO: 227 - protein, 41 aa, Artificial sequence
  Synthetic
PLQFRDVAIEFSLEEWHCLDTAQRNLYRNVMLENYRNLVFL

SEQ ID NO: 228 - protein, 80 aa, Artificial sequence
  Synthetic
GPLQFRDVAIEFSLEEWHCLDTAQRNLYRNVMLENYRNLVFLGIVVSKPDLITCLEQGKKPLTMKKHEMVANPSVTCSHF

SEQ ID NO: 229 - protein, 41 aa, Artificial sequence
  Synthetic
SVAFEDVAVNFTHEEWALLGPSQKNLYRDVMRETIRNLNCI

SEQ ID NO: 230 - protein, 80 aa, Artificial sequence
  Synthetic
TLPRGQPEVLEWGLPKDQDSVAFEDVAVNFTHEEWALLGPSQKNLYRDVMRETIRNLNCIGMKWENQNIDDQHQNLRRNP

SEQ ID NO: 231 - protein, 41 aa, Artificial sequence
  Synthetic
SMTFEDIIVDFTQEEWALLDTSQRKLFQDVMLENISHLVSI

SEQ ID NO: 232 - protein, 80 aa, Artificial sequence
  Synthetic
PSPDSMTFEDIIVDFTQEEWALLDTSQRKLFQDVMLENISHLVSIGKQLCKSVVLSQLEQVEKLSTQRISLLQGREVGIK

SEQ ID NO: 233 - protein, 41 aa, Artificial sequence
  Synthetic
LVTFRDVAIEFSLEEWKCLEPAQRDLYREVTLENFGHLASL

SEQ ID NO: 234 - protein, 80 aa, Artificial sequence
  Synthetic
EESREIRAGQIVLKAMAQGLVTFRDVAIEFSLEEWKCLEPAQRDLYREVTLENFGHLASLGLSISKPDVVSLLEQGKEPW

SEQ ID NO: 235 - protein, 41 aa, Artificial sequence
  Synthetic
SVTFEDVAVTFTQEEWGQLDAAQRTLYQEVMLETCGLLMSL

SEQ ID NO: 236 - protein, 80 aa, Artificial sequence
  Synthetic
AASAQVSVTFEDVAVTFTQEEWGQLDAAQRTLYQEVMLETCGLLMSLGCPLFKPELIYQLDHRQELWMATKDLSQSSYPG

SEQ ID NO: 237 - protein, 41 aa, Artificial sequence
  Synthetic
LLTFKDISIDFTQEEWGQLAPAHQNLYREVMLENYSNLVSV

SEQ ID NO: 238 - protein, 80 aa, Artificial sequence
  Synthetic
RESLEDEVTPGLPTAESQELLTFKDISIDFTQEEWGQLAPAHQNLYREVMLENYSNLVSVGYQLSKPSVISQLEKGEEPW

SEQ ID NO: 239 - protein, 70 aa, Artificial sequence
  Synthetic
IKLKVIGQDSSEIHFKVKMTTHLKKLKESYCQRQGVPMNSLRFLFEGQRIADNHTPKELGMEEEDVIEVY

SEQ ID NO: 240 - protein, 80 aa, Artificial sequence
  Synthetic
EGEYIKLKVIGQDSSEIHFKVKMTTHLKKLKESYCQRQGVPMNSLRFLFEGQRIADNHTPKELGMEEEDVIEVYQEQTGG

SEQ ID NO: 241 - protein, 41 aa, Artificial sequence
  Synthetic
PVSFKDVAVDFTQEEWQQLDPEQKITYRDVMLENYSNLVSV

SEQ ID NO: 242 - protein, 80 aa, Artificial sequence
  Synthetic
NKSLGPVSFKDVAVDFTQEEWQQLDPEQKITYRDVMLENYSNLVSVGYHIIKPDVISKLEQGEEPWIVEGEFLLQSYPDE

SEQ ID NO: 243 - protein, 41 aa, Artificial sequence
  Synthetic
LMAFRDVAVAFTQKEWKLLSSAQRTLYREVMLENYSHLVSL

SEQ ID NO: 244 - protein, 80 aa, Artificial sequence
  Synthetic
SPGLLTTRKEALMAFRDVAVAFTQKEWKLLSSAQRTLYREVMLENYSHLVSLGIAFSKPKLIEQLEQGDEPWREENEHLL

SEQ ID NO: 245 - protein, 41 aa, Artificial sequence
  Synthetic
SVAFEDVAVTFTQEEWALLDPSQKNLCRDVMQETFRNLASI

SEQ ID NO: 246 - protein, 80 aa, Artificial sequence
  Synthetic
MFQDSVAFEDVAVTFTQEEWALLDPSQKNLCRDVMQETFRNLASIGKKWKPQNIYVEYENLRRNLRIVGERLFESKEGHQ

SEQ ID NO: 247 - protein, 70 aa, Artificial sequence
  Synthetic
INLKVAGQDGSVVQFKIKRHTPLSKLMKAYCERQGLSMRQIRFRFDGQPINETDTPAQLEMEDEDTIDVF

SEQ ID NO: 248 - protein, 80 aa, Artificial sequence
  Synthetic
ENDHINLKVAGQDGSVVQFKIKRHTPLSKLMKAYCERQGLSMRQIRFRFDGQPINETDTPAQLEMEDEDTIDVFQQQTGG

SEQ ID NO: 249 - protein, 41 aa, Artificial sequence
  Synthetic
VLTFRDVALEFSLEEWQCLDTAQQNLYRNVMLENYRNLVFV

SEQ ID NO: 250 - protein, 80 aa, Artificial sequence
  Synthetic
PGPLGSLEMGVLTFRDVALEFSLEEWQCLDTAQQNLYRNVMLENYRNLVFVGIAASKPDLITCLEQGKEPWNVKRHEMVT

SEQ ID NO: 251 - protein, 41 aa, Artificial sequence
  Synthetic
SVSFEDVTVDFSREEWQQLDPAQRCLYRDVMLELYSHLFAV

SEQ ID NO: 252 - protein, 80 aa, Artificial sequence
  Synthetic
LSQKPQVLGPEKQDGSCEASVSFEDVTVDFSREEWQQLDPAQRCLYRDVMLELYSHLFAVGYHIPNPEVIFRMLKEKEPR

SEQ ID NO: 253 - protein, 41 aa, Artificial sequence
  Synthetic
QVTFRDVAIEFSQEEWTCLDPAQRTLYRDVMLENYRNLASL

SEQ ID NO: 254 - protein, 80 aa, Artificial sequence
  Synthetic
ALTQGQVTFRDVAIEFSQEEWTCLDPAQRTLYRDVMLENYRNLASLGISCFDLSIISMLEQGKEPFTLESQVQIAGNPDG

SEQ ID NO: 255 - protein, 41 aa, Artificial sequence
  Synthetic
PVTLKDVIVEFTKEEWKLLTPAQRTLYKDVMLENYSHLVSV

SEQ ID NO: 256 - protein, 80 aa, Artificial sequence
  Synthetic
NKFQGPVTLKDVIVEFTKEEWKLLTPAQRTLYKDVMLENYSHLVSVGYHVNKPNAVFKLKQGKEPWILEVEFPHRGFPED

SEQ ID NO: 257 - protein, 40 aa, Artificial sequence
  Synthetic
LLTFRDVAIEFSPEEWKCLDPAQQNLYRDVMLENYRNLVS

SEQ ID NO: 258 - protein, 80 aa, Artificial sequence
  Synthetic
ELLTFRDVAIEFSPEEWKCLDPAQQNLYRDVMLENYRNLVSLAVYSYYNQGILPEQGIQDSFKKATLGRYGSCGLENICL

SEQ ID NO: 259 - protein, 41 aa, Artificial sequence
  Synthetic
SVSFRDVAIDFSREEWRHLDLSQRNLYRDVMLETYSHLLSV

SEQ ID NO: 260 - protein, 80 aa, Artificial sequence
  Synthetic
SPQKSSALAPEDHGSSYEGSVSFRDVAIDFSREEWRHLDLSQRNLYRDVMLETYSHLLSVGYQVPKPEVVMLEQGKEPWA

SEQ ID NO: 261 - protein, 41 aa, Artificial sequence
  Synthetic
RVTFEDVTVNFTQGEWQRLNPEQRNLYRDVMLENYSNLVSV

SEQ ID NO: 262 - protein, 80 aa, Artificial sequence
  Synthetic
NNSQGRVTFEDVTVNFTQGEWQRLNPEQRNLYRDVMLENYSNLVSVGQGETTKPDVILRLEQGKEPWLEEEEVLGSGRAE

SEQ ID NO: 263 - protein, 41 aa, Artificial sequence
  Synthetic
AVVFEDVAVYFTRIEWSCLAPDQQALYRDVMLENYGNLASL

SEQ ID NO: 264 - protein, 80 aa, Artificial sequence
  Synthetic
AMALPMPGPQEAVVFEDVAVYFTRIEWSCLAPDQQALYRDVMLENYGNLASLGFLVAKPALISLLEQGEEPGALILQVAE

SEQ ID NO: 265 - protein, 40 aa, Artificial sequence
  Synthetic
LVTFEDVAVDFTQEEWTLLDQAQRDLYRDVMLENYKNLII

SEQ ID NO: 266 - protein, 80 aa, Artificial sequence
  Synthetic
DSSQHLVTFEDVAVDFTQEEWTLLDQAQRDLYRDVMLENYKNLIILAGSELFKRSLMSGLEQMEELRTGVTGVLQELDLQ

SEQ ID NO: 267 - protein, 41 aa, Artificial sequence
  Synthetic
AVTFKDVAVFFTEEELGLLDPAQRKLYQDVMLENFTNLLSV

SEQ ID NO: 268 - protein, 80 aa, Artificial sequence
  Synthetic
TTFKEAVTFKDVAVFFTEEELGLLDPAQRKLYQDVMLENFTNLLSVGHQPFHPFHFLREEKFWMMETATQREGNSGGKTI

SEQ ID NO: 269 - protein, 41 aa, Artificial sequence
  Synthetic
PLQFRDVAIEFSLEEWHCLDMAQRNLYRDVMLENYRNLVFL

SEQ ID NO: 270 - protein, 80 aa, Artificial sequence
  Synthetic
GPLQFRDVAIEFSLEEWHCLDMAQRNLYRDVMLENYRNLVFLGIVVSKPDLITHLEQGKKPSTMQRHEMVANPSVLCSHF

SEQ ID NO: 271 - protein, 41 aa, Artificial sequence
  Synthetic
SVSFTDVTVDFTQEEWEQLDPSQRILYMDVMLENYSNLLSV

SEQ ID NO: 272 - protein, 80 aa, Artificial sequence
  Synthetic
NKSQGSVSFTDVTVDFTQEEWEQLDPSQRILYMDVMLENYSNLLSVEVWKADDQMERDHRNPDEQARQFLILKNQTPIEE

SEQ ID NO: 273 - protein, 41 aa, Artificial sequence
  Synthetic
SLTFQDVAVDFTREEWDQLYPAQKNLYRDVMLENYRNLVAL

SEQ ID NO: 274 - protein, 80 aa, Artificial sequence
  Synthetic
EEEEMNDGSQMVRSQESLTFQDVAVDFTREEWDQLYPAQKNLYRDVMLENYRNLVALGYQLCKPEVIAQLELEEEWVIER

SEQ ID NO: 275 - protein, 41 aa, Artificial sequence
  Synthetic
RLTFRDVAIEFSLEEWKCLNPAQRALYRAVMLENYRNLEFV

SEQ ID NO: 276 - protein, 80 aa, Artificial sequence
  Synthetic
EEATKKSKEKEPGMALPQGRLTFRDVAIEFSLEEWKCLNPAQRALYRAVMLENYRNLEFVDSSLKSMMEFSSTRHSITGE

SEQ ID NO: 277 - protein, 41 aa, Artificial sequence
  Synthetic
SVTFDDVAVDFTQEEWTLLDSTQRSLYSDVMLENYKNLATV

SEQ ID NO: 278 - protein, 80 aa, Artificial sequence
  Synthetic
EKTPAGRIVADCLTDCYQDSVTFDDVAVDFTQEEWTLLDSTQRSLYSDVMLENYKNLATVGGQIIKPSLISWLEQEESRT

SEQ ID NO: 279 - protein, 41 aa, Artificial sequence
  Synthetic
LLTFRDVAIEFSQEEWKCLDPAQRTLYRDVMLENYRNLVSL

SEQ ID NO: 280 - protein, 80 aa, Artificial sequence
  Synthetic
KTRKRKRKAKESGMALLQGLLTFRDVAIEFSQEEWKCLDPAQRTLYRDVMLENYRNLVSLDTSSKCMMKMFSSTGQGNTE

SEQ ID NO: 281 - protein, 41 aa, Artificial sequence
  Synthetic
SLTFKDVFVDFTLEEWQQLDSAQKNLYRDVMLENYSHLVSV

SEQ ID NO: 282 - protein, 80 aa, Artificial sequence
  Synthetic
AMSQESLTFKDVFVDFTLEEWQQLDSAQKNLYRDVMLENYSHLVSVGHLVGKPDVIFRLGPGDESWMADGGTPVRTCAGE

SEQ ID NO: 283 - protein, 41 aa, Artificial sequence
  Synthetic
SVAFEDVAVNFTLEEWALLDPSQKNLYRDVMRETFRNLASV

SEQ ID NO: 284 - protein, 80 aa, Artificial sequence
  Synthetic
DSVAFEDVAVNFTLEEWALLDPSQKNLYRDVMRETFRNLASVGKQWEDQNIEDPFKIPRRNISHIPERLCESKEGGQGEE

SEQ ID NO: 285 - protein, 41 aa, Artificial sequence
  Synthetic
SVAFEDVAVSFTQEEWALLDPSQKNLYRDVMQETFKNLTSV

SEQ ID NO: 286 - protein, 80 aa, Artificial sequence
  Synthetic
MFQDSVAFEDVAVSFTQEEWALLDPSQKNLYRDVMQETFKNLTSVGKTWKVQNIEDEYKNPRRNLSLMREKLCESKESHH

SEQ ID NO: 287 - protein, 41 aa, Artificial sequence
  Synthetic
TVTFEDVAVKFTQEEWNLLSEAQRCLYRDVTLENLALMSSL

SEQ ID NO: 288 - protein, 80 aa, Artificial sequence
  Synthetic
AVVATLRLSAQGTVTFEDVAVKFTQEEWNLLSEAQRCLYRDVTLENLALMSSLGCWCGVEDEAAPSKQSIYIQRETQVRT

SEQ ID NO: 289 - protein, 41 aa, Artificial sequence
  Synthetic
LVTFEDVAVYFSLEEWERLEADQRGLYQEVMQENYGILVSL

SEQ ID NO: 290 - protein, 80 aa, Artificial sequence
  Synthetic
EEEEEDEDEDDLLTAGCQELVTFEDVAVYFSLEEWERLEADQRGLYQEVMQENYGILVSLGYPIPKPDLIFRLEQGEEPW

SEQ ID NO: 291 - protein, 41 aa, Artificial sequence
  Synthetic
MVTFKDVAVVFTREELGLLDLAQRKLYQDVMLENFRNLLSV

SEQ ID NO: 292 - protein, 80 aa, Artificial sequence
  Synthetic
TKFQEMVTFKDVAVVFTREELGLLDLAQRKLYQDVMLENFRNLLSVGYQPFKLDVILQLGKEDKLRMMETEIQGDGCSGH

SEQ ID NO: 293 - protein, 41 aa, Artificial sequence
  Synthetic
RLTFRDVAIEFSLAEWKCLNPSQRALYREVMLENYRNLEAV

SEQ ID NO: 294 - protein, 80 aa, Artificial sequence
  Synthetic
EEAAQKRKGKEPGMALPQGRLTFRDVAIEFSLAEWKCLNPSQRALYREVMLENYRNLEAVDISSKCMMKEVLSTGQGNTE

SEQ ID NO: 295 - protein, 41 aa, Artificial sequence
  Synthetic
TVVFEDVVVDFTLEEWALLNPAQRKLYRDVMLETFKHLASV

SEQ ID NO: 296 - protein, 80 aa, Artificial sequence
  Synthetic
DTVVFEDVVVDFTLEEWALLNPAQRKLYRDVMLETFKHLASVDNEAQLKASGSISQQDTSGEKLSLKQKIEKFTRKNIWA

SEQ ID NO: 297 - protein, 41 aa, Artificial sequence
  Synthetic
GLTFKDVAVVFTEEELGLLDPVQRNLYQDVMLENFRNLLSV

SEQ ID NO: 298 - protein, 80 aa, Artificial sequence
  Synthetic
TTFKEGLTFKDVAVVFTEEELGLLDPVQRNLYQDVMLENFRNLLSVGHHPFKHDVFLLEKEKKLDIMKTATQRKGKSADK

SEQ ID NO: 299 - protein, 41 aa, Artificial sequence
  Synthetic
LVTFDSVAVEFTQEEWTLLDPAQRNLYSDVMLENYKNLSSV

SEQ ID NO: 300 - protein, 80 aa, Artificial sequence
  Synthetic
SALQQEFWKIQTSNGIQMDLVTFDSVAVEFTQEEWTLLDPAQRNLYSDVMLENYKNLSSVGYQLFKPSLISWLEEEEELS

SEQ ID NO: 301 - protein, 41 aa, Artificial sequence
  Synthetic
CVIFEEVAVNFTPEEWALLDHAQRSLYRDVMLETCRNLASL

SEQ ID NO: 302 - protein, 80 aa, Artificial sequence
  Synthetic
DCVIFEEVAVNFTPEEWALLDHAQRSLYRDVMLETCRNLASLDCYIYVRTSGSSSQRDVFGNGISNDEEIVKFTGSDSWS

SEQ ID NO: 303 - protein, 41 aa, Artificial sequence
  Synthetic
LLTFRDVTIEFSLEEWEFLNPAQQSLYRKVMLENYRNLVSL

SEQ ID NO: 304 - protein, 80 aa, Artificial sequence
  Synthetic
ELLTFRDVTIEFSLEEWEFLNPAQQSLYRKVMLENYRNLVSLGLTVSKPELISRLEQRQEPWNVKRHETIAKPPAMSSHY

SEQ ID NO: 305 - protein, 41 aa, Artificial sequence
  Synthetic
SLTLEDVAVEFSWEEWQLLDTAQKNLYRDVMVENYNHLVSL

SEQ ID NO: 306 - protein, 80 aa, Artificial sequence
  Synthetic
IKTQESLTLEDVAVEFSWEEWQLLDTAQKNLYRDVMVENYNHLVSLGYQTSKPDVLSKLAHGQEPWTTDAKIQNKNCPGI

SEQ ID NO: 307 - protein, 41 aa, Artificial sequence
  Synthetic
AVSFADVAVYFSPEEWECLRPAQRALYRDVMRETFGHLGAL

SEQ ID NO: 308 - protein, 80 aa, Artificial sequence
  Synthetic
PAHVPGEAGPRRTRESRPGAVSFADVAVYFSPEEWECLRPAQRALYRDVMRETFGHLGALGFSVPKPAFISWVEGEVEAW

SEQ ID NO: 309 - protein, 40 aa, Artificial sequence
  Synthetic
TMTFKDVEVTFSQDEWGWLDSAQRNLYRDVMLENYRNMAS

SEQ ID NO: 310 - protein, 80 aa, Artificial sequence
  Synthetic
GCPGDQVTPTRSLTAQLQETMTFKDVEVTFSQDEWGWLDSAQRNLYRDVMLENYRNMASLVGPFTKPALISWLEAREPWG

SEQ ID NO: 311 - protein, 40 aa, Artificial sequence
  Synthetic
LVMFRDVAVDFSQEEWECLNSYQRNLYRDVILENYSNLVS

SEQ ID NO: 312 - protein, 80 aa, Artificial sequence
  Synthetic
ARDLVMFRDVAVDFSQEEWECLNSYQRNLYRDVILENYSNLVSLAGCSISKPDVITLLEQGKEPWMVVRDEKRRWTLDLE

SEQ ID NO: 313 - protein, 41 aa, Artificial sequence
  Synthetic
AVTFKDVAVVFTEEELRLLDLAQRKLYREVMLENFRNLLSV

SEQ ID NO: 314 - protein, 80 aa, Artificial sequence
  Synthetic
TTLKEAVTFKDVAVVFTEEELRLLDLAQRKLYREVMLENFRNLLSVGHQSLHRDTFHFLKEEKFWMMETATQREGNLGGK

SEQ ID NO: 315 - protein, 41 aa, Artificial sequence
  Synthetic
GMTFEDVAIYFSQEEWELLDESQRFLYCDVMLENFAHVTSL

SEQ ID NO: 316 - protein, 80 aa, Artificial sequence
  Synthetic
SPPSPRSSMAAVALRDSAQGMTFEDVAIYFSQEEWELLDESQRFLYCDVMLENFAHVTSLGYCHGMENEAIASEQSVSIQ

SEQ ID NO: 317 - protein, 41 aa, Artificial sequence
  Synthetic
RLTFMDVAIEFSQEEWKSLDPGQRALYRDVMLENYRNLVFL

SEQ ID NO: 318 - protein, 80 aa, Artificial sequence
  Synthetic
DEEAQKRKAKESGMALPQGRLTFMDVAIEFSQEEWKSLDPGQRALYRDVMLENYRNLVFLGICLPDLSIISMLKQRREPL

SEQ ID NO: 319 - protein, 41 aa, Artificial sequence
  Synthetic
PLKFMDVAIEFSQEEWKCLDPAQRTLYRDVMLENYRNLVSL

SEQ ID NO: 320 - protein, 80 aa, Artificial sequence
  Synthetic
ALTQGPLKFMDVAIEFSQEEWKCLDPAQRTLYRDVMLENYRNLVSLGICLPDLSVTSMLEQKRDPWTLQSEEKIANDPDG

SEQ ID NO: 321 - protein, 41 aa, Artificial sequence
  Synthetic
AVTFKDVAVVFTEEELGLLDVSQRKLYRDVMLENFRNLLSV

SEQ ID NO: 322 - protein, 80 aa, Artificial sequence
  Synthetic
TMFKEAVTFKDVAVVFTEEELGLLDVSQRKLYRDVMLENFRNLLSVGHQLSHRDTFHFQREEKFWIMETATQREGNSGGK

SEQ ID NO: 323 - protein, 41 aa, Artificial sequence
  Synthetic
TVAFEDVAVNFSQEEWSLLSEVQRCLYHDVMLENWVLISSL

SEQ ID NO: 324 - protein, 80 aa, Artificial sequence
  Synthetic
QGTVAFEDVAVNFSQEEWSLLSEVQRCLYHDVMLENWVLISSLGCWCGSEDEEAPSKKSISIQRVSQVSTPGAGVSPKKA

SEQ ID NO: 325 - protein, 50 aa, Artificial sequence
  Synthetic
FEVEKILDMKTEGGKVLYKVRWKGYTSDDDTWEPEIHLEDCKEVLLEFRK

SEQ ID NO: 326 - protein, 80 aa, Artificial sequence
  Synthetic
AEAFGDSEEDGEDVFEVEKILDMKTEGGKVLYKVRWKGYTSDDDTWEPEIHLEDCKEVLLEFRKKIAENKAKAVRKDIQR

SEQ ID NO: 327 - protein, 41 aa, Artificial sequence
  Synthetic
SISLEDVAVNFTLEEWALLDPGQRNIYRDVMRATFKNLACI

SEQ ID NO: 328 - protein, 80 aa, Artificial sequence
  Synthetic
VLQMQNSEHHGQSIKTQTDSISLEDVAVNFTLEEWALLDPGQRNIYRDVMRATFKNLACIGEKWKDQDIEDEHKNQGRNL

SEQ ID NO: 329 - protein, 41 aa, Artificial sequence
  Synthetic
SVTFDDVAVTFTQEEWGQLDLAQRTLYQEVMLENCGLLVSL

SEQ ID NO: 330 - protein, 80 aa, Artificial sequence
  Synthetic
AMALTDPAQVSVTFDDVAVTFTQEEWGQLDLAQRTLYQEVMLENCGLLVSLGCPVPRPELIYHLEHGQEPWTRKEDLSQG

SEQ ID NO: 331 - protein, 41 aa, Artificial sequence
  Synthetic
SVTFRDVAIDFSQEEWECLQPDQRTLYRDVMLENYSHLISL

SEQ ID NO: 332 - protein, 80 aa, Artificial sequence
  Synthetic
VHGSVTFRDVAIDFSQEEWECLQPDQRTLYRDVMLENYSHLISLGSSISKPDVITLLEQEKEPWIVVSKETSRWYPDLES

SEQ ID NO: 333 - protein, 41 aa, Artificial sequence
  Synthetic
PVACEDVAVNFTQEEWALLDISQRKLYREVMLETFRNLTSI

SEQ ID NO: 334 - protein, 80 aa, Artificial sequence
  Synthetic
DPVACEDVAVNFTQEEWALLDISQRKLYREVMLETFRNLTSIGKKWKDQNIEYEYQNPRRNFRSLIEGNVNEIKEDSHCG

SEQ ID NO: 335 - protein, 40 aa, Artificial sequence
  Synthetic
RVTFKDVAVVFTKEELALLDKAQINLYQDVMLENFRNLML

SEQ ID NO: 336 - protein, 80 aa, Artificial sequence
  Synthetic
IKFQERVTFKDVAVVFTKEELALLDKAQINLYQDVMLENFRNLMLVRDGIKNNILNLQAKGLSYLSQEVLHCWQIWKQRI

SEQ ID NO: 337 - protein, 41 aa, Artificial sequence
  Synthetic
PLTFRDVAIEFSLKEWQCLDTAQRNLYRNVMLENYRNLVFL

SEQ ID NO: 338 - protein, 80 aa, Artificial sequence
  Synthetic
GPLTFRDVAIEFSLKEWQCLDTAQRNLYRNVMLENYRNLVFLGITVSKPDLITCLEQGKEAWSMKRHEIMVAKPTVMCSH

SEQ ID NO: 339 - protein, 41 aa, Artificial sequence
  Synthetic
AVTFKDVAVVFTEEELGLLDLAQRKLYRDVMLENFRNLLSV

SEQ ID NO: 340 - protein, 80 aa, Artificial sequence
  Synthetic
TMSKEAVTFKDVAVVFTEEELGLLDLAQRKLYRDVMLENFRNLLSVGHQPFHRDTFHFLREEKFWMMDIATQREGNSGGK

SEQ ID NO: 341 - protein, 41 aa, Artificial sequence
  Synthetic
PLEFRDVAIEFSLEEWHCLDTAQQNLYRDVMLENYRHLVFL

SEQ ID NO: 342 - protein, 80 aa, Artificial sequence
  Synthetic
GPLEFRDVAIEFSLEEWHCLDTAQQNLYRDVMLENYRHLVFLGIVVTKPDLITCLEQGKKPFTVKRHEMIAKSPVMCFHF

SEQ ID NO: 343 - protein, 41 aa, Artificial sequence
  Synthetic
LVTFEDVAVEFTQEEWALLDPAQRTLYRDVMLENCRNLASL

SEQ ID NO: 344 - protein, 80 aa, Artificial sequence
  Synthetic
GHTEGGELVNELLKSWLKGLVTFEDVAVEFTQEEWALLDPAQRTLYRDVMLENCRNLASLGNQVDKPRLISQLEQEDKVM

SEQ ID NO: 345 - protein, 41 aa, Artificial sequence
  Synthetic
TVTFDDVALYFSEQEWEILEKWQKQMYKQEMKTNYETLDSL

SEQ ID NO: 346 - protein, 80 aa, Artificial sequence
  Synthetic
AEPASVTVTFDDVALYFSEQEWEILEKWQKQMYKQEMKTNYETLDSLGYAFSKPDLITWMEQGRMLLISEQGCLDKTRRT

SEQ ID NO: 347 - protein, 41 aa, Artificial sequence
  Synthetic
PLSFKDVAVVFTEEELELLDSTQRQLYQDVMQENFRNLLSV

SEQ ID NO: 348 - protein, 80 aa, Artificial sequence
  Synthetic
HSQASAISQDREEKIMSQEPLSFKDVAVVFTEEELELLDSTQRQLYQDVMQENFRNLLSVGERNPLGDKNGKDTEYIQDE

SEQ ID NO: 349 - protein, 41 aa, Artificial sequence
  Synthetic
PVTFKDVAVDFTQEEWGQLDLVQRTLYRDVMLETYGHLLSV

SEQ ID NO: 350 - protein, 80 aa, Artificial sequence
  Synthetic
GSLEEGRRATGLPAAQVQEPVTFKDVAVDFTQEEWGQLDLVQRTLYRDVMLETYGHLLSVGNQIAKPEVISLLEQGEEPW

SEQ ID NO: 351 - protein, 41 aa, Artificial sequence
  Synthetic
AVTFKDVAVVFTEEELGLLDPAQRKLYRDVMLENFRNLLSV

SEQ ID NO: 352 - protein, 80 aa, Artificial sequence
  Synthetic
TTFKEAVTFKDVAVVFTEEELGLLDPAQRKLYRDVMLENFRNLLSVGHQPFHQDTCHFLREEKFWMMGTATQREGNSGGK

SEQ ID NO: 353 - protein, 41 aa, Artificial sequence
  Synthetic
AVTFKDVAVIFTEEELGLLDPAQRKLYRDVMLENFRNLLSV

SEQ ID NO: 354 - protein, 80 aa, Artificial sequence
  Synthetic
AKLYEAVTFKDVAVIFTEEELGLLDPAQRKLYRDVMLENFRNLLSVGGKIQTEMETVPEAGTHEEFSCKQIWEQIASDLT

SEQ ID NO: 355 - protein, 41 aa, Artificial sequence
  Synthetic
SVAFEDVAVNFTQEEWALLGPSQKSLYRDVMWETIRNLDCI

SEQ ID NO: 356 - protein, 80 aa, Artificial sequence
  Synthetic
RSDLFLPDSQTNEERKQYDSVAFEDVAVNFTQEEWALLGPSQKSLYRDVMWETIRNLDCIGMKWEDTNIEDQHRNPRRSL

SEQ ID NO: 357 - protein, 41 aa, Artificial sequence
  Synthetic
LLTFRDVAIEFSPEEWQCLDTAQQNLYRNVMLENYRNLAFL

SEQ ID NO: 358 - protein, 80 aa, Artificial sequence
  Synthetic
PGTPGSLEMGLLTFRDVAIEFSPEEWQCLDTAQQNLYRNVMLENYRNLAFLGIALSKPDLITYLEQGKEPWNMKQHEMVD

SEQ ID NO: 359 - protein, 41 aa, Artificial sequence
  Synthetic
QVTFEDVVVGFSQEEWGQLKPAQRTLYRDVMLDTFRLLVSV

SEQ ID NO: 360 - protein, 80 aa, Artificial sequence
  Synthetic
TPGVRVSTDPEQVTFEDVVVGFSQEEWGQLKPAQRTLYRDVMLDTFRLLVSVGHWLPKPNVISLLEQEAELWAVESRLPQ

SEQ ID NO: 361 - protein, 41 aa, Artificial sequence
  Synthetic
AVTFDDVAVDFTQEEWTLLDPSQRDLYRDVMLENYENLASV

SEQ ID NO: 362 - protein, 80 aa, Artificial sequence
  Synthetic
EQTQAAGMVAGWLINCYQDAVTFDDVAVDFTQEEWTLLDPSQRDLYRDVMLENYENLASVEWRLKTKGPALRQDRSWFRA

SEQ ID NO: 363 - protein, 32 aa, Artificial sequence
  Synthetic
RPRLKNVDRSTAQQLAVTVGNVTVIITDFKEK

SEQ ID NO: 364 - protein, 80 aa, Artificial sequence
  Synthetic
PSEANSIQSANATTKTSETNHTSRPRLKNVDRSTAQQLAVTVGNVTVIITDFKEKTRSSSTSSSTVTSSAGSEQQNQSSS

SEQ ID NO: 365 - protein, 41 aa, Artificial sequence
  Synthetic
QLSFSDVAIEFSQEEWKCLDPGQKALYRDVMLENYRNLVSL

SEQ ID NO: 366 - protein, 80 aa, Artificial sequence
  Synthetic
ALTQGQLSFSDVAIEFSQEEWKCLDPGQKALYRDVMLENYRNLVSLGEDNVRPEACICSGICLPDLSVTSMLEQKRDPWT

SEQ ID NO: 367 - protein, 41 aa, Artificial sequence
  Synthetic
SVTFEDVAVNFSLEEWSLLNEAQRCLYRDVMLETLTLISSL

SEQ ID NO: 368 - protein, 80 aa, Artificial sequence
  Synthetic
AAAAALRAPAQSSVTFEDVAVNFSLEEWSLLNEAQRCLYRDVMLETLTLISSLGCWHGGEDEAAPSKQSTCIHIYKDQGG

SEQ ID NO: 369 - protein, 41 aa, Artificial sequence
  Synthetic
SVSFNDVTVDFTQEEWQHLDHAQKTLYMDVMLENYCHLISV

SEQ ID NO: 370 - protein, 80 aa, Artificial sequence
  Synthetic
AQGSVSFNDVTVDFTQEEWQHLDHAQKTLYMDVMLENYCHLISVGCHMTKPDVILKLERGEEPWTSFAGHTCLEENWKAE

SEQ ID NO: 371 - protein, 41 aa, Artificial sequence
  Synthetic
PVAFKDVAVNFTQEEWALLDISQRKLYREVMLETFRNLTSL

SEQ ID NO: 372 - protein, 80 aa, Artificial sequence
  Synthetic
DPVAFKDVAVNFTQEEWALLDISQRKLYREVMLETFRNLTSLGKRWKDQNIEYEHQNPRRNFRSLIEEKVNEIKDDSHCG

SEQ ID NO: 373 - protein, 41 aa, Artificial sequence
  Synthetic
LVTFGDVAVNFSQEEWEWLNPAQRNLYRKVMLENYRSLVSL

SEQ ID NO: 374 - protein, 80 aa, Artificial sequence
  Synthetic
SKDLVTFGDVAVNFSQEEWEWLNPAQRNLYRKVMLENYRSLVSLGVSVSKPDVISLLEQGKEPWMVKKEGTRGPCPDWEY

SEQ ID NO: 375 - protein, 41 aa, Artificial sequence
  Synthetic
SVAFEDVAINFTCEEWALLGPSQKSLYRDVMQETIRNLDCI

SEQ ID NO: 376 - protein, 80 aa, Artificial sequence
  Synthetic
DSVAFEDVAINFTCEEWALLGPSQKSLYRDVMQETIRNLDCIGMIWQNHDIEEDQYKDLRRNLRCHMVERACEIKDNSQC

SEQ ID NO: 377 - protein, 41 aa, Artificial sequence
  Synthetic
PLTFMDVAIEFCLEEWQCLDIAQQNLYRNVMLENYRNLVFL

SEQ ID NO: 378 - protein, 80 aa, Artificial sequence
  Synthetic
GPLTFMDVAIEFCLEEWQCLDIAQQNLYRNVMLENYRNLVFLGIAVSKPDLITCLEQEKEPWEPMRRHEMVAKPPVMCSH

SEQ ID NO: 379 - protein, 52 aa, Artificial sequence
  Synthetic
EPEKIIGATDSCGDLMFLMKWKDTDEADLVLAKEANVKCPQIVIAFYEERLT

SEQ ID NO: 380 - protein, 80 aa, Artificial sequence
  Synthetic
QSNDIARGFERGLEPEKIIGATDSCGDLMFLMKWKDTDEADLVLAKEANVKCPQIVIAFYEERLTWHAYPEDAENKEKET

SEQ ID NO: 381 - protein, 40 aa, Artificial sequence
  Synthetic
PVTFEDVAVLFTEAEWKRLSLEQRNLYKEVMLENLRNLVS

SEQ ID NO: 382 - protein, 80 aa, Artificial sequence
  Synthetic
ALPAKDSAWPWEEKPRYLGPVTFEDVAVLFTEAEWKRLSLEQRNLYKEVMLENLRNLVSLAESKPEVHTCPSCPLAFGSQ

SEQ ID NO: 383 - protein, 41 aa, Artificial sequence
  Synthetic
LVTFKDVFVDFTREEWKLLDTAQQIVYRNVMLENYKNLVSL

SEQ ID NO: 384 - protein, 80 aa, Artificial sequence
  Synthetic
DAKSLTAWSRTLVTFKDVFVDFTREEWKLLDTAQQIVYRNVMLENYKNLVSLGYQLTKPDVILRLEKGEEPWLVEREIHQ

SEQ ID NO: 385 - protein, 40 aa, Artificial sequence
  Synthetic
AVAFEDVAVNFTQEEWALLGPSQKNLYRYVMQETIRNLDC

SEQ ID NO: 386 - protein, 80 aa, Artificial sequence
  Synthetic
DAVAFEDVAVNFTQEEWALLGPSQKNLYRYVMQETIRNLDCIRMIWEEQNTEDQYKNPRRNLRCHMVERFSESKDSSQCG

SEQ ID NO: 387 - protein, 41 aa, Artificial sequence
  Synthetic
SVTFDDVAVDFTPEEWALLDTTEKYLYRDVMLENYMNLASV

SEQ ID NO: 388 - protein, 80 aa, Artificial sequence
  Synthetic
EKTKVERMVEDYLASGYQDSVTFDDVAVDFTPEEWALLDTTEKYLYRDVMLENYMNLASVEWEIQPRTKRSSLQQGFLKN

SEQ ID NO: 389 - protein, 41 aa, Artificial sequence
  Synthetic
SVAFEDVDVNFTQEEWALLDPSQKNLYRDVMWETMRNLASI

SEQ ID NO: 390 - protein, 80 aa, Artificial sequence
  Synthetic
DSVAFEDVDVNFTQEEWALLDPSQKNLYRDVMWETMRNLASIGKKWKDQNIKDHYKHRGRNLRSHMLERLYQTKDGSQRG

SEQ ID NO: 391 - protein, 41 aa, Artificial sequence
  Synthetic
PVTFEDVAVDFTQEEWQQLNPAQKTLHRDVMLETYNHLVSV

SEQ ID NO: 392 - protein, 80 aa, Artificial sequence
  Synthetic
IESQEPVTFEDVAVDFTQEEWQQLNPAQKTLHRDVMLETYNHLVSVGCSGIKPDVIFKLEHGKDPWIIESELSRWIYPDR

SEQ ID NO: 393 - protein, 41 aa, Artificial sequence
  Synthetic
LVTFRDVALDFSQEEWEWLKPSQKDLYRDVMLENYRNLVWL

SEQ ID NO: 394 - protein, 80 aa, Artificial sequence
  Synthetic
AVGLCKAMSQGLVTFRDVALDFSQEEWEWLKPSQKDLYRDVMLENYRNLVWLGLSISKPNMISLLEQGKEPWMVERKMSQ

SEQ ID NO: 395 - protein, 40 aa, Artificial sequence
  Synthetic
PVTFADVAVVFTPEEWVFLDSTQRSLYRDVMLENYRNLAS

SEQ ID NO: 396 - protein, 80 aa, Artificial sequence
  Synthetic
DKVEEEAMAPGLPTACSQEPVTFADVAVVFTPEEWVFLDSTQRSLYRDVMLENYRNLASVADQLCKPNALSYLEERGEQW

SEQ ID NO: 397 - protein, 40 aa, Artificial sequence
  Synthetic
MTFEDVAVYFSQEEWGLLDTAQRALYRHVMLENFTLVTSL

SEQ ID NO: 398 - protein, 80 aa, Artificial sequence
  Synthetic
TFEDVAVYFSQEEWGLLDTAQRALYRHVMLENFTLVTSLGLSTSRPRVVIQLERGEEPWVPSGKDMTLARNTYGRLNSGS

SEQ ID NO: 399 - protein, 41 aa, Artificial sequence
  Synthetic
PLTFEDVAIYFSEQEWQDLEAWQKELYKHVMRSNYETLVSL

SEQ ID NO: 400 - protein, 80 aa, Artificial sequence
  Synthetic
AEPPRLPLTFEDVAIYFSEQEWQDLEAWQKELYKHVMRSNYETLVSLDDGLPKPELISWIEHGGEPFRKWRESQKSGNII

SEQ ID NO: 401 - protein, 41 aa, Artificial sequence
  Synthetic
SVVFEDVAVNFTQEEWALLGPSQKKLYRDVMQETFVNLASI

SEQ ID NO: 402 - protein, 80 aa, Artificial sequence
  Synthetic
DSVVFEDVAVNFTQEEWALLGPSQKKLYRDVMQETFVNLASIGENWEEKNIEDHKNQGRKLRSHMVERLCERKEGSQFGE

SEQ ID NO: 403 - protein, 41 aa, Artificial sequence
  Synthetic
CVTFEDVTIYFSQEEWVLLDEAQRLLYCDVMLENFALIASL

SEQ ID NO: 404 - protein, 80 aa, Artificial sequence
  Synthetic
AAAALRDPAQGCVTFEDVTIYFSQEEWVLLDEAQRLLYCDVMLENFALIASLGLISFRSHIVSQLEMGKEPWVPDSVDMT

SEQ ID NO: 405 - protein, 41 aa, Artificial sequence
  Synthetic
LVSFEDVVVTFTGEEWGHLDLAQRTLYQEVMLETCRLLVSL

SEQ ID NO: 406 - protein, 80 aa, Artificial sequence
  Synthetic
AAPALALVSFEDVVVTFTGEEWGHLDLAQRTLYQEVMLETCRLLVSLGHPVPKPELIYLLEHGQELWTVKRGLSQSTCAG

SEQ ID NO: 407 - protein, 41 aa, Artificial sequence
  Synthetic
SLTLEDVAVEFTWEEWQLLGPAQKDLYRDVMLENYSNLVSV

SEQ ID NO: 408 - protein, 80 aa, Artificial sequence
  Synthetic
IKSQESLTLEDVAVEFTWEEWQLLGPAQKDLYRDVMLENYSNLVSVGYQASKPDALFKLEQGEPWTVENEIHSQICPEIK

SEQ ID NO: 409 - protein, 41 aa, Artificial sequence
  Synthetic
LLTFKDVSVDFTQEEWGQLAPAHRNLYREVMLENYGNLVSV

SEQ ID NO: 410 - protein, 80 aa, Artificial sequence
  Synthetic
GESLESRVTLGSLTAESQELLTFKDVSVDFTQEEWGQLAPAHRNLYREVMLENYGNLVSVGCQLSKPGVISQLEKGEEPW

SEQ ID NO: 411 - protein, 41 aa, Artificial sequence
  Synthetic
SVALEDVAVNFTREEWALLGPCQKNLYKDVMQETIRNLDCV

SEQ ID NO: 412 - protein, 80 aa, Artificial sequence
  Synthetic
ASVALEDVAVNFTREEWALLGPCQKNLYKDVMQETIRNLDCVGMKWKDQNIEDQYRYPRKNLRCRMLERFVESKDGTQCG

SEQ ID NO: 413 - protein, 41 aa, Artificial sequence
  Synthetic
TVTFKDVAIDFTQEEWKRLDPAQRKLYRNVMLENYNNLITV

SEQ ID NO: 414 - protein, 80 aa, Artificial sequence
  Synthetic
TESQGTVTFKDVAIDFTQEEWKRLDPAQRKLYRNVMLENYNNLITVGYPFTKPDVIFKLEQEEEPWVMEEEVLRRHWQGE

SEQ ID NO: 415 - protein, 41 aa, Artificial sequence
  Synthetic
SVASEDVAVNFTLEEWALLDPSQKKLYRDVMRETFRNLACV

SEQ ID NO: 416 - protein, 80 aa, Artificial sequence
  Synthetic
DSVASEDVAVNFTLEEWALLDPSQKKLYRDVMRETFRNLACVGKKWEDQSIEDWYKNQGRILRNHMEEGLSESKEYDQCG

SEQ ID NO: 417 - protein, 41 aa, Artificial sequence
  Synthetic
SLAFRDVSIDLSQEEWECLDAVQRDLYKDVMLENYSNLVSL

SEQ ID NO: 418 - protein, 80 aa, Artificial sequence
  Synthetic
EETQGELTSSCGSKTMANVSLAFRDVSIDLSQEEWECLDAVQRDLYKDVMLENYSNLVSLGYTIPKPDVITLLEQEKEPW

SEQ ID NO: 419 - protein, 41 aa, Artificial sequence
  Synthetic
PVSFEDVSVYFTKTEWKLLDLRQKVLYKRVMLENYSHLVSL

SEQ ID NO: 420 - protein, 80 aa, Artificial sequence
  Synthetic
AAILLTTRPKVPVSFEDVSVYFTKTEWKLLDLRQKVLYKRVMLENYSHLVSLGFSFSKPHLISQLERGEGPWVADIPRTW

SEQ ID NO: 421 - protein, 32 aa, Artificial sequence
  Synthetic
RPRLKNVDRSSAQHLEVTVGDLTVIITDFKEK

SEQ ID NO: 422 - protein, 80 aa, Artificial sequence
  Synthetic
KDKVEKEKSEKETTSKKNSHKKTRPRLKNVDRSSAQHLEVTVGDLTVIITDFKEKTKSPPASSAASADQHSQSGSSSDNT

SEQ ID NO: 423 - protein, 41 aa, Artificial sequence
  Synthetic
PLTFTDVAIKFSLEEWQFLDTAQQNLYRDVMLENYRNLVFL

SEQ ID NO: 424 - protein, 80 aa, Artificial sequence
  Synthetic
GPLTFTDVAIKFSLEEWQFLDTAQQNLYRDVMLENYRNLVFLGVGVSKPDLITCLEQGKEPWNMKRHKMVAKPPVVCSHF

SEQ ID NO: 425 - protein, 41 aa, Artificial sequence
  Synthetic
EVTFEDVAVYLSREEWGRLGPAQRGLYRDVMLETYGNLVSL

SEQ ID NO: 426 - protein, 80 aa, Artificial sequence
  Synthetic
RKPNPQAMAALFLSAPPQAEVTFEDVAVYLSREEWGRLGPAQRGLYRDVMLETYGNLVSLGVGPAGPKPGVISQLERGDE

SEQ ID NO: 427 - protein, 41 aa, Artificial sequence
  Synthetic
PVAFKDVAVNFTQEEWALLDISQKNLYREVMLETFWNLTSI

SEQ ID NO: 428 - protein, 80 aa, Artificial sequence
  Synthetic
LSLSPILLYTCEMFQDPVAFKDVAVNFTQEEWALLDISQKNLYREVMLETFWNLTSIGKKWKDQNIEYEYQNPRRNFRSV

SEQ ID NO: 429 - protein, 40 aa, Artificial sequence
  Synthetic
PVTFEDVAVNFTQEEWDCLDASQRVLYQDVMSETFKNLTS

SEQ ID NO: 430 - protein, 80 aa, Artificial sequence
  Synthetic
AAGEPRSLLFFQKPVTFEDVAVNFTQEEWDCLDASQRVLYQDVMSETFKNLTSVARIFLHKPELITKLEQEEEQWRETRV

SEQ ID NO: 431 - protein, 41 aa, Artificial sequence
  Synthetic
MVTFEDVAVHFTKTEWTGLSPAQRALYRSVMLENFGNLTAL

SEQ ID NO: 432 - protein, 80 aa, Artificial sequence
  Synthetic
AAMPLKAQYQEMVTFEDVAVHFTKTEWTGLSPAQRALYRSVMLENFGNLTALGYPVPKPALISLLERGDMAWGLEAQDDP

SEQ ID NO: 433 - protein, 41 aa, Artificial sequence
  Synthetic
PLTFSDVAIDFSQEEWEYLNSDQRDLYRDVMLENYTNLVSL

SEQ ID NO: 434 - protein, 80 aa, Artificial sequence
  Synthetic
ARVPLTFSDVAIDFSQEEWEYLNSDQRDLYRDVMLENYTNLVSLDFNFTTESNKLSSEKRNYEVNAYHQETWKRNKTFNL

SEQ ID NO: 435 - protein, 41 aa, Artificial sequence
  Synthetic
PVTFEDVTLGFTPEEWGLLDLKQKSLYREVMLENYRNLVSV

SEQ ID NO: 436 - protein, 80 aa, Artificial sequence
  Synthetic
ASRLPTAWSCEPVTFEDVTLGFTPEEWGLLDLKQKSLYREVMLENYRNLVSVEHQLSKPDVVSQLEEAEDFWPVERGIPQ

SEQ ID NO: 437 - protein, 52 aa, Artificial sequence
  Synthetic
DPERIIGATDSSGELMFLMKWKDSDEADLVLAKEANMKCPQIVIAFYEERLT

SEQ ID NO: 438 - protein, 80 aa, Artificial sequence
  Synthetic
SKKKRDAADKPRGFARGLDPERIIGATDSSGELMFLMKWKDSDEADLVLAKEANMKCPQIVIAFYEERLTWHSCPEDEAQ

SEQ ID NO: 439 - protein, 41 aa, Artificial sequence
  Synthetic
SVTFEDVAIAFSQQEWESLDSSQRGLYRDVMLENYRNLVSM

SEQ ID NO: 440 - protein, 80 aa, Artificial sequence
  Synthetic
AHKYVGLQYHGSVTFEDVAIAFSQQEWESLDSSQRGLYRDVMLENYRNLVSMGHSRSKPHVIALLEQWKEPEVTVRKDGR

SEQ ID NO: 441 - protein, 41 aa, Artificial sequence
  Synthetic
KLTFEDVAVLLSQDEWDRLCPAQRGLYRNVMMETYGNVVSL

SEQ ID NO: 442 - protein, 80 aa, Artificial sequence
  Synthetic
AAARLLPVPAGPQPLSFQAKLTFEDVAVLLSQDEWDRLCPAQRGLYRNVMMETYGNVVSLGLPGSKPDIISQLERGEDPW

SEQ ID NO: 443 - protein, 41 aa, Artificial sequence
  Synthetic
LVTFRDVAVDFSQEEWDCLDSSQRHLYSNVMLENYRILVSL

SEQ ID NO: 444 - protein, 80 aa, Artificial sequence
  Synthetic
AVGLLKAMYQELVTFRDVAVDFSQEEWDCLDSSQRHLYSNVMLENYRILVSLGLCFSKPSVILLLEQGKAPWMVKRELTK

SEQ ID NO: 445 - protein, 41 aa, Artificial sequence
  Synthetic
LLTFRDVAIEFSLEEWQCLDTAQRNLYKNVILENYRNLVFL

SEQ ID NO: 446 - protein, 80 aa, Artificial sequence
  Synthetic
GLLTFRDVAIEFSLEEWQCLDTAQRNLYKNVILENYRNLVFLGIAVSKQDLITCLEQEKEPLTVKRHEMVNEPPVMCSHF

SEQ ID NO: 447 - protein, 41 aa, Artificial sequence
  Synthetic
LLAFRDVALEFSPEEWECLDPAQRSLYRDVMLENYRNLISL

SEQ ID NO: 448 - protein, 80 aa, Artificial sequence
  Synthetic
GLLAFRDVALEFSPEEWECLDPAQRSLYRDVMLENYRNLISLGEDSFNMQFLFHSLAMSKPELIICLEARKEPWNVNTEK

SEQ ID NO: 449 - protein, 41 aa, Artificial sequence
  Synthetic
RVVFEDVAIYFSQEEWGHLDEAQRLLYRDVMLENLALLSSL

SEQ ID NO: 450 - protein, 80 aa, Artificial sequence
  Synthetic
NLTEGRVVFEDVAIYFSQEEWGHLDEAQRLLYRDVMLENLALLSSLGSWHGAEDEEAPSQQGFSVGVSEVTASKPCLSSQ

SEQ ID NO: 451 - protein, 41 aa, Artificial sequence
  Synthetic
AVTFKDVAVVFSREELRLLDLTQRKLYRDVMVENFKNLVAV

SEQ ID NO: 452 - protein, 80 aa, Artificial sequence
  Synthetic
SQNYDLPQKKQEKMTKFQEAVTFKDVAVVFSREELRLLDLTQRKLYRDVMVENFKNLVAVGHLPFQPDMVSQLEAEEKLW

SEQ ID NO: 453 - protein, 41 aa, Artificial sequence
  Synthetic
MVTFEDVAVYFSQEEWELLDAAQRHLYHSVMLENLELVTSL

SEQ ID NO: 454 - protein, 80 aa, Artificial sequence
  Synthetic
GPAQHTSWPCGSAVPTLKSMVTFEDVAVYFSQEEWELLDAAQRHLYHSVMLENLELVTSLGSWHGVEGEGAHPKQNVSVE

SEQ ID NO: 455 - protein, 41 aa, Artificial sequence
  Synthetic
PLTFRDVVIEFSQEEWQCLDTAQQDLYRKVMLENFRNLVFL

SEQ ID NO: 456 - protein, 80 aa, Artificial sequence
  Synthetic
SGYPGAERNLLEYSYFEKGPLTFRDVVIEFSQEEWQCLDTAQQDLYRKVMLENFRNLVFLGIDVSKPDLITCLEQGKDPW

SEQ ID NO: 457 - protein, 41 aa, Artificial sequence
  Synthetic
LVMFRDVAIDFSQEEWECLDSAQRDLYRDVMLENYSNLVSL

SEQ ID NO: 458 - protein, 80 aa, Artificial sequence
  Synthetic
ARKLVMFRDVAIDFSQEEWECLDSAQRDLYRDVMLENYSNLVSLDLPSRCASKDLSPEKNTYETELSQWEMSDRLENCDL

SEQ ID NO: 459 - protein, 40 aa, Artificial sequence
  Synthetic
MTFEDVAVEFSQWEWGQLNPAQKDLYREVMLENFRNLAIL

SEQ ID NO: 460 - protein, 80 aa, Artificial sequence
  Synthetic
TFEDVAVEFSQWEWGQLNPAQKDLYREVMLENFRNLAILGLLVSKPYVICQLEEGGEPFMVEREISTGAHSDWKRRSKSK

SEQ ID NO: 461 - protein, 41 aa, Artificial sequence
  Synthetic
PLQFRDVAIEFSLEEWHCLDTAQRNLYRNVMLENYSNLVFL

SEQ ID NO: 462 - protein, 80 aa, Artificial sequence
  Synthetic
GPLQFRDVAIEFSLEEWHCLDTAQRNLYRNVMLENYSNLVFLGITVSKPDLITCLEQGRKPLTMKRNEMIAKPSVMCSHF

SEQ ID NO: 463 - protein, 41 aa, Artificial sequence
  Synthetic
RVTFKDIAVIFTKEELAVLDKAQINLYQDVMLENFRNFISV

SEQ ID NO: 464 - protein, 80 aa, Artificial sequence
  Synthetic
IKFQERVTFKDIAVIFTKEELAVLDKAQINLYQDVMLENFRNFISVDGIKNNILNLQGKGLIYLSQEELHCWKIWKQRIR

SEQ ID NO: 465 - protein, 41 aa, Artificial sequence
  Synthetic
SVTFEDVAVDFTQEEWTLLDQTQRNLYRDVMLENYKNLVAV

SEQ ID NO: 466 - protein, 80 aa, Artificial sequence
  Synthetic
VAGWLTNYSQDSVTFEDVAVDFTQEEWTLLDQTQRNLYRDVMLENYKNLVAVDWESHINTKWSAPQQNFLQGKTSSVVEM

SEQ ID NO: 467 - protein, 41 aa, Artificial sequence
  Synthetic
SVTFEDVAVTFTQEEWGQLDVTQRALYVEVMLETCGLLVAL

SEQ ID NO: 468 - protein, 80 aa, Artificial sequence
  Synthetic
AAAWMAPAQESVTFEDVAVTFTQEEWGQLDVTQRALYVEVMLETCGLLVALGDSTKPETVEPIPSHLALPEEVSLQEQLA

SEQ ID NO: 469 - protein, 41 aa, Artificial sequence
  Synthetic
PLSFMDVFVDFTWEEWQLLDPAQKCLYRSVMLENYSNLVSL

SEQ ID NO: 470 - protein, 80 aa, Artificial sequence
  Synthetic
VLEWLFISQEQPKITKSWGPLSFMDVFVDFTWEEWQLLDPAQKCLYRSVMLENYSNLVSLGYQHTKPDIIFKLEQGEELC

SEQ ID NO: 471 - protein, 41 aa, Artificial sequence
  Synthetic
CVTFEDVFVYFSREEWELLEEAQRFLYRDVMLENFALVATL

SEQ ID NO: 472 - protein, 80 aa, Artificial sequence
  Synthetic
AAAVLMDRVQSCVTFEDVFVYFSREEWELLEEAQRFLYRDVMLENFALVATLGFWCEAEHEAPSEQSVSVEGVSQVRTAE

SEQ ID NO: 473 - protein, 41 aa, Artificial sequence
  Synthetic
LVTFEDVLVDFSPEELSSLSAAQRNLYREVMLENYRNLVSL

SEQ ID NO: 474 - protein, 80 aa, Artificial sequence
  Synthetic
AGSQFPDFKHLGTFLVFEELVTFEDVLVDFSPEELSSLSAAQRNLYREVMLENYRNLVSLGHQFSKPDIISRLEEEESYA

SEQ ID NO: 475 - protein, 41 aa, Artificial sequence
  Synthetic
QISFEDVAVDFTLEEWQLLNPTQKNLYRDVMLENYSNLVFL

SEQ ID NO: 476 - protein, 80 aa, Artificial sequence
  Synthetic
IQSQISFEDVAVDFTLEEWQLLNPTQKNLYRDVMLENYSNLVFLEVWLDNPKMWLRDNQDNLKSMERGHKYDVFGKIFNS

SEQ ID NO: 477 - protein, 41 aa, Artificial sequence
  Synthetic
LVAFEDVAVNFTQEEWSLLDPSQKNLYREVMQETLRNLASI

SEQ ID NO: 478 - protein, 80 aa, Artificial sequence
  Synthetic
DLVAFEDVAVNFTQEEWSLLDPSQKNLYREVMQETLRNLASIGEKWKDQNIEDQYKNPRNNLRSLLGERVDENTEENHCG

SEQ ID NO: 479 - protein, 70 aa, Artificial sequence
  Synthetic
IKLRVIGQDSSEIHFKVKMTTPLKKLKKSYCQRQGVPVNSLRFLFEGQRIADNHTPEELGMEEEDVIEVY

SEQ ID NO: 480 - protein, 80 aa, Artificial sequence
  Synthetic
KDEDIKLRVIGQDSSEIHFKVKMTTPLKKLKKSYCQRQGVPVNSLRFLFEGQRIADNHTPEELGMEEEDVIEVYQEQIGG

SEQ ID NO: 481 - protein, 41 aa, Artificial sequence
  Synthetic
SVAFEDVAVNFTQEEWALLSPSQKNLYRDVTLETFRNLASV

SEQ ID NO: 482 - protein, 80 aa, Artificial sequence
  Synthetic
DSVAFEDVAVNFTQEEWALLSPSQKNLYRDVTLETFRNLASVGIQWKDQDIENLYQNLGIKLRSLVERLCGRKEGNEHRE

SEQ ID NO: 483 - protein, 41 aa, Artificial sequence
  Synthetic
PVTFDDVAVYFSELEWGKLEDWQKELYKHVMRGNYETLVSL

SEQ ID NO: 484 - protein, 80 aa, Artificial sequence
  Synthetic
RNFWILRLPPGSKGEAPKVPVTFDDVAVYFSELEWGKLEDWQKELYKHVMRGNYETLVSLDYAISKPDILTRIERGEEPC

SEQ ID NO: 485 - protein, 41 aa, Artificial sequence
  Synthetic
TVTFEDVAVNFSQEEWCLLSEAQRCLYRDVMLENLALISSL

SEQ ID NO: 486 - protein, 80 aa, Artificial sequence
  Synthetic
AAAAPRRPTQQGTVTFEDVAVNFSQEEWCLLSEAQRCLYRDVMLENLALISSLGCWCGSKDEEAPCKQRISVQRESQSRT

SEQ ID NO: 487 - protein, 41 aa, Artificial sequence
  Synthetic
LVTFEDVAVDFTQEEWQYLNPPQRTLYRDVMLETYSNLVFV

SEQ ID NO: 488 - protein, 80 aa, Artificial sequence
  Synthetic
SGEDSGSFYSWQKAKREQGLVTFEDVAVDFTQEEWQYLNPPQRTLYRDVMLETYSNLVFVGQQVTKPNLILKLEVEECPA

SEQ ID NO: 489 - protein, 41 aa, Artificial sequence
  Synthetic
SVAFEDVAVNFTQEEWALLGPSQKSLYRNVMQETIRNLDCI

SEQ ID NO: 490 - protein, 80 aa, Artificial sequence
  Synthetic
DSVAFEDVAVNFTQEEWALLGPSQKSLYRNVMQETIRNLDCIEMKWEDQNIGDQCQNAKRNLRSHTCEIKDDSQCGETFG

SEQ ID NO: 491 - protein, 41 aa, Artificial sequence
  Synthetic
SVTFQEVAVDFSQEEWALLDPAQKNLYKDVMLENFRNLASV

SEQ ID NO: 492 - protein, 80 aa, Artificial sequence
  Synthetic
AAGWLTTWSQNSVTFQEVAVDFSQEEWALLDPAQKNLYKDVMLENFRNLASVGYQLCRHSLISKVDQEQLKTDERGILQG

SEQ ID NO: 493 - protein, 41 aa, Artificial sequence
  Synthetic
LVMFEEVSVCFTSEEWACLGPIQRALYWDVMLENYGNVTSL

SEQ ID NO: 494 - protein, 80 aa, Artificial sequence
  Synthetic
ENPRNQLMALMLLTAQPQELVMFEEVSVCFTSEEWACLGPIQRALYWDVMLENYGNVTSLEWETMTENEEVTSKPSSSQR

SEQ ID NO: 495 - protein, 41 aa, Artificial sequence
  Synthetic
LVSFEEVAVHFTWEEWQDLDDAQRTLYRDVMLETYSSLVSL

SEQ ID NO: 496 - protein, 80 aa, Artificial sequence
  Synthetic
LETYNSLVSLQELVSFEEVAVHFTWEEWQDLDDAQRTLYRDVMLETYSSLVSLGHCITKPEMIFKLEQGAEPWIVEETPN

SEQ ID NO: 497 - protein, 41 aa, Artificial sequence
  Synthetic
SVAFEDVAVNFTQEEWALLDSSQKNLYREVMQETCRNLASV

SEQ ID NO: 498 - protein, 80 aa, Artificial sequence
  Synthetic
RHFRRPEPCREPLASPIQDSVAFEDVAVNFTQEEWALLDSSQKNLYREVMQETCRNLASVGSQWKDQNIEDHFEKPGKDI

SEQ ID NO: 499 - protein, 41 aa, Artificial sequence
  Synthetic
IVTFEDVAVYFSWKEWGLLDEAQKCLYHDVMLENLTLTTSL

SEQ ID NO: 500 - protein, 80 aa, Artificial sequence
  Synthetic
AAAELTAPAQGIVTFEDVAVYFSWKEWGLLDEAQKCLYHDVMLENLTLTTSLGGSGAGDEEAPYQQSTSPQRVSQVRIPK

SEQ ID NO: 501 - protein, 41 aa, Artificial sequence
  Synthetic
PLTFQDVAVYFSQAEGRQLGPQQRALYRDVMLENYGNVASL

SEQ ID NO: 502 - protein, 80 aa, Artificial sequence
  Synthetic
AATFQLPGHQEMPLTFQDVAVYFSQAEGRQLGPQQRALYRDVMLENYGNVASLGFPVPKPELISQLEQGKELWVLNLLGA

SEQ ID NO: 503 - protein, 29 aa, Artificial sequence
  Synthetic
SEFKPFFGNIIITDVTANCLTVTFKEYVT

SEQ ID NO: 504 - protein, 80 aa, Artificial sequence
  Synthetic
RSEAGEPPSSLQVKPETPASAAVAVAAAAAPTTTAEKPPAEAQDEPAESLSEFKPFFGNIIITDVTANCLTVTFKEYVTV

SEQ ID NO: 505 - protein, 39 aa, Artificial sequence
  Synthetic
MCALCGGYFIDATTIVECLHSFCKTCIVRYLETNKYCPM

SEQ ID NO: 506 - protein, 80 aa, Artificial sequence
  Synthetic
HRTTRIKITELNPHLMCALCGGYFIDATTIVECLHSFCKTCIVRYLETNKYCPMCDVQVHKTRPLLSIRSDKTLQDIVYK

SEQ ID NO: 507 - protein, 51 aa, Artificial sequence
  Synthetic
FEVEAIVDKRQDKNGNTQYLVRWKGYDKQDDTWEPEQHLMNCEKCVHDFNR

SEQ ID NO: 508 - protein, 80 aa, Artificial sequence
  Synthetic
ASQEFEVEAIVDKRQDKNGNTQYLVRWKGYDKQDDTWEPEQHLMNCEKCVHDFNRRQTEKQKKLTWTTTSRIFSNNARRR

SEQ ID NO: 509 - protein, 50 aa, Artificial sequence
  Synthetic
YEVERIVDKRKNKKGKWEYLIRWKGYGSTEDTWEPEHHLLHCEEFIDEFN

SEQ ID NO: 510 - protein, 80 aa, Artificial sequence
  Synthetic
ASGDLYEVERIVDKRKNKKGKWEYLIRWKGYGSTEDTWEPEHHLLHCEEFIDEFNGLHMSKDKRIKSGKQSSTSKLLRDS

SEQ ID NO: 511 - protein, 41 aa, Artificial sequence
  Synthetic
SMTFKDVAVDITQEDWELMRPVQKELYKTVTLQNYWNMVSL

SEQ ID NO: 512 - protein, 80 aa, Artificial sequence
  Synthetic
PRGKHAFQTGWLNDLVTKESMTFKDVAVDITQEDWELMRPVQKELYKTVTLQNYWNMVSLGLTVYRPTVIPILEEPWMVI

SEQ ID NO: 513 - protein, 72 aa, Artificial sequence
  Synthetic
RKADLENHNKDGGFWTVIDGKVYDIKDFQTQSLTGNSILAQFAGEDPVVALEAALQFEDTRESMHAFCVGQY

SEQ ID NO: 514 - protein, 80 aa, Artificial sequence
  Synthetic
TLIRKADLENHNKDGGFWTVIDGKVYDIKDFQTQSLTGNSILAQFAGEDPVVALEAALQFEDTRESMHAFCVGQYLEPDQ

SEQ ID NO: 515 - protein, 41 aa, Artificial sequence
  Synthetic
SVTFDDVAVEFTPEEWALLDTTQKYLYRDVMLENYMNLASV

SEQ ID NO: 516 - protein, 80 aa, Artificial sequence
  Synthetic
EKTKIGTMVEDHRSNSYQDSVTFDDVAVEFTPEEWALLDTTQKYLYRDVMLENYMNLASVDFFFCLTSEWEIQPRTKRSS

SEQ ID NO: 517 - protein, 41 aa, Artificial sequence
  Synthetic
LVMFRDVAIDVSQEEWECLNPAQRNLYKEVMLENYSNLVSL

SEQ ID NO: 518 - protein, 80 aa, Artificial sequence
  Synthetic
AHELVMFRDVAIDVSQEEWECLNPAQRNLYKEVMLENYSNLVSLGLSVSKPAVISSLEQGKEPWMVVREETGRWCPGTWK

SEQ ID NO: 519 - protein, 40 aa, Artificial sequence
  Synthetic
MAFEDVAVYFSQEEWGLLDTAQRALYRRVMLDNFALVASL

SEQ ID NO: 520 - protein, 80 aa, Artificial sequence
  Synthetic
AFEDVAVYFSQEEWGLLDTAQRALYRRVMLDNFALVASLGLSTSRPRVVIQLERGEEPWVPSGTDTTLSRTTYRRRNPGS

SEQ ID NO: 521 - protein, 41 aa, Artificial sequence
  Synthetic
HLTFRDVAIEFSQEEWKCLDPVQKALYRDVMLENYRNLVSL

SEQ ID NO: 522 - protein, 80 aa, Artificial sequence
  Synthetic
AQLRRGHLTFRDVAIEFSQEEWKCLDPVQKALYRDVMLENYRNLVSLGICLPDLSIISMMKQRTEPWTVENEMKVAKNPD

SEQ ID NO: 523 - protein, 41 aa, Artificial sequence
  Synthetic
LLYNMNDCYSKLKELVPSIPQNKKVSKMEILQHVIDYILDL

SEQ ID NO: 524 - protein, 80 aa, Artificial sequence
  Synthetic
SDHSLGISRSKTPVDDPMSLLYNMNDCYSKLKELVPSIPQNKKVSKMEILQHVIDYILDLQIALDSHPTIVSLHHQRPGQ

SEQ ID NO: 525 - protein, 68 aa, Artificial sequence
  Synthetic
PQKPVSAYALFFRDTQAAIKGQNPNATFGEVSKIVASMWDGLGEEQKQVYKKKTEAAKKEYLKQLAAY

SEQ ID NO: 526 - protein, 80 aa, Artificial sequence
  Synthetic
KDPNEPQKPVSAYALFFRDTQAAIKGQNPNATFGEVSKIVASMWDGLGEEQKQVYKKKTEAAKKEYLKQLAAYRASLVSK

SEQ ID NO: 527 - protein, 41 aa, Artificial sequence
  Synthetic
PVTFQDVAVDFSREEWGLLGPTQRTEYRDVMLETFGHLVSV

SEQ ID NO: 528 - protein, 80 aa, Artificial sequence
  Synthetic
QEEKQEDAAICPVTVLPEEPVTFQDVAVDFSREEWGLLGPTQRTEYRDVMLETFGHLVSVGWETTLENKELAPNSDIPEE

SEQ ID NO: 529 - protein, 41 aa, Artificial sequence
  Synthetic
LLTFEDMAVYFSEEEWQLLGPLEKTLYNDVMQDIYETAISL

SEQ ID NO: 530 - protein, 80 aa, Artificial sequence
  Synthetic
KSTKDWKMAPKLIWPESQSLLTFEDMAVYFSEEEWQLLGPLEKTLYNDVMQDIYETAISLGKQRTGKIMGIEMASSFSKE

SEQ ID NO: 531 - protein, 65 aa, Artificial sequence
  Synthetic
SSWTVEDVMQFVREADPQLGPHADLFRKHEIDGKALLLLRSDMMMKYMGLKLGPALKLSYHIDRL

SEQ ID NO: 532 - protein, 80 aa, Artificial sequence
  Synthetic
DASRLSGRDPSSWTVEDVMQFVREADPQLGPHADLFRKHEIDGKALLLLRSDMMMKYMGLKLGPALKLSYHIDRLKQGKF

SEQ ID NO: 533 - protein, 41 aa, Artificial sequence
  Synthetic
SVTFEDTAVDFTQEEWILLDPVQRNLYRDVMLENYENVAKV

SEQ ID NO: 534 - protein, 80 aa, Artificial sequence
  Synthetic
AYCLTNCYQYSVTFEDTAVDFTQEEWILLDPVQRNLYRDVMLENYENVAKVGFQLFKPSVISWLEEEELRTLQQGVLQDW

SEQ ID NO: 535 - protein, 66 aa, Artificial sequence
  Synthetic
SAWTVEDVVWFVKDADPQALGPHVELFRKHEIDGNALLLLKSDMVMKYLGLKLGPALKLCYHIDKL

SEQ ID NO: 536 - protein, 80 aa, Artificial sequence
  Synthetic
ARRPRSRNPSAWTVEDVVWFVKDADPQALGPHVELFRKHEIDGNALLLLKSDMVMKYLGLKLGPALKLCYHIDKLKQAKF

SEQ ID NO: 537 - protein, 41 aa, Artificial sequence
  Synthetic
AVTFEDVTIIFTWEEWKFLDSSQKRLYREVMWENYTNVMSV

SEQ ID NO: 538 - protein, 80 aa, Artificial sequence
  Synthetic
AVTFEDVTIIFTWEEWKFLDSSQKRLYREVMWENYTNVMSVENWNESYKSQEEKFRYLEYENFSYWQGWWNAGAQMYENQ

SEQ ID NO: 539 - protein, 49 aa, Artificial sequence [sequence omitted]

SEQ ID NO: 540 - protein, 80 aa, Artificial sequence
  Synthetic
ELSAIGEQVFAVESIRKKRVRKGKVEYLVKWKGWPPKYSTWEPEEHILDPRLVMAYEEKEERDRASGYRKRGPKPKRLLL

SEQ ID NO: 541 - protein, 40 aa, Artificial sequence
  Synthetic
LYDMNGCYSRLKELVPTLPQNRKVSKVEILQHVIDYIRDL

SEQ ID NO: 542 - protein, 80 aa, Artificial sequence
  Synthetic
GGAGARLPALLDEQQVNVLLYDMNGCYSRLKELVPTLPQNRKVSKVEILQHVIDYIRDLQLELNSESEVGTPGGRGLPVR

SEQ ID NO: 543 - protein, 45 aa, Artificial sequence
  Synthetic
AKECRRRKKEYVKCLESRVAVLEVQNKKLIEELETLKDICSPKTD

SEQ ID NO: 544 - protein, 80 aa, Artificial sequence
  Synthetic
VVMAASPGSLHSPQQLAEEATRKRELRLMKNREAAKECRRRKKEYVKCLESRVAVLEVQNKKLIEELETLKDICSPKTDY

SEQ ID NO: 545 - protein, 52 aa, Artificial sequence
  Synthetic
QRQAANIRERKRMFNLNEAFDQLRRKVPTFAYEKRLSRIETLRLAIVYISFM

SEQ ID NO: 546 - protein, 80 aa, Artificial sequence
  Synthetic
SLLGRPKRKRVITYAQRQAANIRERKRMFNLNEAFDQLRRKVPTFAYEKRLSRIETLRLAIVYISFMTELLESCEKKESG

SEQ ID NO: 547 - protein, 52 aa, Artificial sequence
  Synthetic
QRHTANARERDRTNSVNTAFTALRTLIPTEPADRKLSKIETLRLASSYISHL

SEQ ID NO: 548 - protein, 80 aa, Artificial sequence
  Synthetic
GGGPGGRPGREPRQRHTANARERDRTNSVNTAFTALRTLIPTEPADRKLSKIETLRLASSYISHLGNVLLAGEACGDGQP

SEQ ID NO: 549 - protein, 52 aa, Artificial sequence
  Synthetic
AVARRNERERNRVKLVNLGFATLREHVPNGAANKKMSKVETLRSAVEYIRAL

SEQ ID NO: 550 - protein, 80 aa, Artificial sequence
  Synthetic
SGFGYSLPQQQPAAVARRNERERNRVKLVNLGFATLREHVPNGAANKKMSKVETLRSAVEYIRALQQLLDEHDAVSAAFQ

SEQ ID NO: 551 - protein, 41 aa, Artificial sequence
  Synthetic
AVSFADVAVYFCREEWGCLRPAQRALYRDVMRETYGHLSAL

SEQ ID NO: 552 - protein, 80 aa, Artificial sequence
  Synthetic
APLPPRDPNGAGPEWREPGAVSFADVAVYFCREEWGCLRPAQRALYRDVMRETYGHLSALGIGGNKPALISWVEEEAELW

SEQ ID NO: 553 - protein, 66 aa, Artificial sequence
  Synthetic
STWSVDEVIQFMKHTDPQISGPLADLFRQHEIDGKALFLLKSDVMMKYMGLKLGPALKLCYYIEKL

SEQ ID NO: 554 - protein, 80 aa, Artificial sequence
  Synthetic
KQGFSKDPSTWSVDEVIQFMKHTDPQISGPLADLFRQHEIDGKALFLLKSDVMMKYMGLKLGPALKLCYYIEKLKEGKYS

SEQ ID NO: 555 - protein, 51 aa, Artificial sequence
  Synthetic
IQKRNERERQRVKCVNEGYARLRGHLPGALAEKRLSKVETLRAAIRYIKYL

SEQ ID NO: 556 - protein, 80 aa, Artificial sequence
  Synthetic
GAFGVYEYPFEPAFIQKRNERERQRVKCVNEGYARLRGHLPGALAEKRLSKVETLRAAIRYIKYLQELLSSAPDGSTPPA

SEQ ID NO: 557 - protein, 51 aa, Artificial sequence
  Synthetic
QRVMANVRERQRTQSLNEAFAALRKIIPTLPSDKLSKIQTLKLAARYIDFL

SEQ ID NO: 558 - protein, 80 aa, Artificial sequence
  Synthetic
SGGGSPQSYEELQTQRVMANVRERQRTQSLNEAFAALRKIIPTLPSDKLSKIQTLKLAARYIDFLYQVLQSDELDSKMAS

SEQ ID NO: 559 - protein, 25 aa, Artificial sequence
  Synthetic
DLQRHRRVHTGEKPYKCPNCDKAFK

SEQ ID NO: 560 - protein, 80 aa, Artificial sequence
  Synthetic
FVQHRCDPAREKPLKCPDCEKRFKYASDLQRHRRVHTGEKPYKCPNCDKAFKQREHLNKHQGVHAREQQFKCVWCGERFL

SEQ ID NO: 561 - protein, 41 aa, Artificial sequence
  Synthetic
CMVFEDVAIYFSQEEWGILNDAQRHLHSNVMLENFALLSSV

SEQ ID NO: 562 - protein, 80 aa, Artificial sequence
  Synthetic
NLTEDCMVFEDVAIYFSQEEWGILNDAQRHLHSNVMLENFALLSSVGCWHGAKDEEVPSKQCVSVRVLQVTIPKPALSTL

SEQ ID NO: 563 - protein, 41 aa, Artificial sequence
  Synthetic
FVTLKDVGMDFTLGDWEQLGLEQGDTFWDTALDNCQDLFLL

SEQ ID NO: 564 - protein, 80 aa, Artificial sequence
  Synthetic
AEEFVTLKDVGMDFTLGDWEQLGLEQGDTFWDTALDNCQDLFLLDPPRPNLTSHPDGSEDLEPLAGGSPEATSPDVTETK

SEQ ID NO: 565 - protein, 41 aa, Artificial sequence
  Synthetic
HEKFPSDLDLDMFNGSLECDMESIIRSELMDADGLDFNFDS

SEQ ID NO: 566 - protein, 80 aa, Artificial sequence
  Synthetic
DSLSGSSLYSTSANLPVMGHEKFPSDLDLDMFNGSLECDMESIIRSELMDADGLDFNFDSLISTQNVVGLNVGNFTGAKQ

SEQ ID NO: 567 - protein, 40 aa, Artificial sequence
  Synthetic
QEKLPSDLDGMFIERLDCDMESIIRNDLMDGDTLDFNFDN

SEQ ID NO: 568 - protein, 80 aa, Artificial sequence
  Synthetic
GGYSSVSSCNGYGRMGLLHQEKLPSDLDGMFIERLDCDMESIIRNDLMDGDTLDFNFDNVLPNQSFPHSVKTTTHSWVSG

SEQ ID NO: 569 - protein, 46 aa, Artificial sequence
  Synthetic
GNCIEHVQPTSAFIQQPFIDEDPDKEKKIKELEMLLMSAENEVRRK

SEQ ID NO: 570 - protein, 80 aa, Artificial sequence
  Synthetic
FYIPVQIPGYQYVSPEGNCIEHVQPTSAFIQQPFIDEDPDKEKKIKELEMLLMSAENEVRRKRIPSQPGSFSSWSGSFLM

SEQ ID NO: 571 - protein, 46 aa, Artificial sequence
  Synthetic
VNIVNVPQPAAAAIQRHYNDEDPEKEKRIKELELLLMSTENELKGQ

SEQ ID NO: 572 - protein, 80 aa, Artificial sequence
  Synthetic
EAQNVSSHVPYPVALHVNIVNVPQPAAAAIQRHYNDEDPEKEKRIKELELLLMSTENELKGQQVLPTQNHTCSYPGWHST

SEQ ID NO: 573 - protein, 46 aa, Artificial sequence
  Synthetic
ESPSDEGALLDQLYLALRNFDGLEEIDRALGIPELVSQSQAVDPEQ

SEQ ID NO: 574 - protein, 80 aa, Artificial sequence
  Synthetic
PFGSSPDDLLCPHPAAESPSDEGALLDQLYLALRNFDGLEEIDRALGIPELVSQSQAVDPEQFSSQDSNIMLEQKAPVFP

SEQ ID NO: 575 - protein, 34 aa, Artificial sequence
  Synthetic
PFSPVQLHQLRAQILAYKMLARGQPLPETLQLAV

SEQ ID NO: 576 - protein, 80 aa, Artificial sequence
  Synthetic
SQPGALIPGDPQAMSQPNRGPSPFSPVQLHQLRAQILAYKMLARGQPLPETLQLAVQGKRTLPGLQQQQQQQQQQQQQQQ

SEQ ID NO: 577 - protein, 29 aa, Artificial sequence
  Synthetic
LPEGWEEARDFDGKVYYIDHTNRTTSWID

SEQ ID NO: 578 - protein, 80 aa, Artificial sequence
  Synthetic
PRPELPLPEGWEEARDFDGKVYYIDHTNRTTSWIDPRDRYTKPLTFADCISDELPLGWEEAYDPQVGDYFIDHNTKTTQI

SEQ ID NO: 579 - protein, 48 aa, Artificial sequence
  Synthetic
EGQSDERALLDQLHTLLSNTDATGLEEIDRALGIPELVNQGQALEPKQ

SEQ ID NO: 580 - protein, 80 aa, Artificial sequence
  Synthetic
LRNSLDDLVGPPSNLEGQSDERALLDQLHTLLSNTDATGLEEIDRALGIPELVNQGQALEPKQDAFQGQEAAVMMDQKAG

SEQ ID NO: 581 - protein, 41 aa, Artificial sequence
  Synthetic
PDRFPADLDLDMFSGSLECDVESIILNDFMDSDEMDFNFDS

SEQ ID NO: 582 - protein, 80 aa, Artificial sequence
  Synthetic
LDALPGPYAAAAAGPLGAAPDRFPADLDLDMFSGSLECDVESIILNDFMDSDEMDFNFDSALPPPPPGLAGAPPPNQSWV

SEQ ID NO: 583 - protein, 41 aa, Artificial sequence
  Synthetic
PILFEDLAVYFSQEECVTLHPAQRSLSKDGTKESLEDAALM

SEQ ID NO: 584 - protein, 80 aa, Artificial sequence
  Synthetic
ASMPPTPEAQGPILFEDLAVYFSQEECVTLHPAQRSLSKDGTKESLEDAALMGEEGKPEINQQLSLESMELDELALEKYP

SEQ ID NO: 585 - protein, 28 aa, Artificial sequence
  Synthetic
LPAGWMRVQDTSGTYYWHIPTGTTQWEP

SEQ ID NO: 586 - protein, 80 aa, Artificial sequence
  Synthetic
GSPSYGSPEDTDSFWNPNAFETDSDLPAGWMRVQDTSGTYYWHIPTGTTQWEPPGRASPSQGSSPQEESQLTWTGFAHGE

SEQ ID NO: 587 - protein, 45 aa, Artificial sequence
  Synthetic
VAIADYAATDETQLSFLRGEKILILRQTTADWWWGERAGCCGYIP

SEQ ID NO: 588 - protein, 80 aa, Artificial sequence
  Synthetic
ECSEAGLLQEGVQPEEFVAIADYAATDETQLSFLRGEKILILRQTTADWWWGERAGCCGYIPANHVGKHVDEYDPEDTWQ

SEQ ID NO: 589 - protein, 75 aa, Artificial sequence
  Synthetic
SFLPLVHNIIKCMDKDSPEVHQDLNALKSKFQEMRKLISTMPGIHLSPEQQQQQLQSLREQVRTKNELLQKYKSL

SEQ ID NO: 590 - protein, 80 aa, Artificial sequence
  Synthetic
NYSFLPLVHNIIKCMDKDSPEVHQDLNALKSKFQEMRKLISTMPGIHLSPEQQQQQLQSLREQVRTKNELLQKYKSLCMF

SEQ ID NO: 591 - protein, 48 aa, Artificial sequence
  Synthetic
YCICRKPDINCFMIGCDNCNEWFHGDCIRITEKMAKAIREWYCRECRE

SEQ ID NO: 592 - protein, 80 aa, Artificial sequence
  Synthetic
AGEDSKSENGENAPIYCICRKPDINCFMIGCDNCNEWFHGDCIRITEKMAKAIREWYCRECREKDPKLEIRYRHKKSRER

SEQ ID NO: 593 - protein, 77 aa, Artificial sequence
  Synthetic
PNIILTGDSSPGFSKEIAAALAGVPGFEVSAAGLELGLGLEDELRMEPLGLEGLNMLSDPCALLPDPAVEESFRSDR

SEQ ID NO: 594 - protein, 80 aa, Artificial sequence
  Synthetic
GPNIILTGDSSPGFSKEIAAALAGVPGFEVSAAGLELGLGLEDELRMEPLGLEGLNMLSDPCALLPDPAVEESFRSDRLQ

SEQ ID NO: 595 - protein, 34 aa, Artificial sequence
  Synthetic
WANCSSPLPCWDYINNQCDELCNTVECLFDNFEC

SEQ ID NO: 596 - protein, 80 aa, Artificial sequence
  Synthetic
EACNSHACQWDGGDCSLTMENPWANCSSPLPCWDYINNQCDELCNTVECLFDNFECQGNSKTCKYDKYCADHFKDNHCDQ

SEQ ID NO: 597 - protein, 26 aa, Artificial sequence
  Synthetic
KECPICKERFPAESDKDALEDHMDGH

SEQ ID NO: 598 - protein, 80 aa, Artificial sequence
  Synthetic
SGGEEANLLLPELGSAFYDMASGFTVGTLSETSTGGPATPTWKECPICKERFPAESDKDALEDHMDGHFFFSTQDPFTFE

SEQ ID NO: 599 - protein, 56 aa, Artificial sequence
  Synthetic
PCGICTNEVNDDQDAILCEASCQKWFHRICTGMTETAYGLLTAEASAVWGCDTCMA

SEQ ID NO: 600 - protein, 80 aa, Artificial sequence
  Synthetic
RHGHSSSDPVYPCGICTNEVNDDQDAILCEASCQKWFHRICTGMTETAYGLLTAEASAVWGCDTCMADKDVQLMRTRETF

SEQ ID NO: 601 - protein, 36 aa, Artificial sequence
  Synthetic
AQMIEENLNCLGHLSTIIHEANEEQGNSMMNLDWSW

SEQ ID NO: 602 - protein, 80 aa, Artificial sequence
  Synthetic
LVGSSLEGAVTPQTSAWLPPTSAEHDHSLSCVVTPQDGETSAQMIEENLNCLGHLSTIIHEANEEQGNSMMNLDWSWLTE

SEQ ID NO: 603 - protein, 79 aa, Artificial sequence
  Synthetic
DLAPPRKALFTYPKGAGEMLEDGSERFLCESVFSYQVASTLKQVKHDQQVARMEKLAGLVEELEADEWRFKPIEQLLGF

SEQ ID NO: 604 - protein, 80 aa, Artificial sequence
  Synthetic
DLAPPRKALFTYPKGAGEMLEDGSERFLCESVFSYQVASTLKQVKHDQQVARMEKLAGLVEELEADEWRFKPIEQLLGFT

SEQ ID NO: 605 - protein, 28 aa, Artificial sequence
  Synthetic
LPPGWEKRQDNGRVYYVNHNTRTTQWED

SEQ ID NO: 606 - protein, 80 aa, Artificial sequence
  Synthetic
AMQHFSQRFLYQSSSASTDHDPLGPLPPGWEKRQDNGRVYYVNHNTRTTQWEDPRTQGMIQEPALPPGWEMKYTSEGVRY

SEQ ID NO: 607 - protein, 68 aa, Artificial sequence
  Synthetic
FLVQEVMEEEWNALQSVENCPEDLAQLEELIDMAVLEEIQQELINQEQSIISEYEKSLQFDEKCLSIM

SEQ ID NO: 608 - protein, 80 aa, Artificial sequence
  Synthetic
NSQNSFLVQEVMEEEWNALQSVENCPEDLAQLEELIDMAVLEEIQQELINQEQSIISEYEKSLQFDEKCLSIMLAEWEAN

SEQ ID NO: 609 - protein, 61 aa, Artificial sequence
  Synthetic
AYLDELVELHRRLMTLRERHILQQIVNLIEETGHFHITNTTFDFDLCSLDKTTVRKLQSYL

SEQ ID NO: 610 - protein, 80 aa, Artificial sequence
  Synthetic
KSDKQIKNGECDKAYLDELVELHRRLMTLRERHILQQIVNLIEETGHFHITNTTFDFDLCSLDKTTVRKLQSYLETSGTS

SEQ ID NO: 611 - protein, 37 aa, Artificial sequence
  Synthetic
LVTIKNLAVDFRQQLHPAQKNFCKNGIWENNSDLGSA

SEQ ID NO: 612 - protein, 80 aa, Artificial sequence
  Synthetic
LEYSLLGEHWDYDALFETQPGLVTIKNLAVDFRQQLHPAQKNFCKNGIWENNSDLGSAGHCVAKPDLVSLLEQEKEPWMV

SEQ ID NO: 613 - protein, 29 aa, Artificial sequence
  Synthetic
LPPGWEKRVDSTDRVYFVNHNTKTTQWED

SEQ ID NO: 614 - protein, 80 aa, Artificial sequence
  Synthetic
AMQQFNQRYLYSASMLAAENDPYGPLPPGWEKRVDSTDRVYFVNHNTKTTQWEDPRTQGLQNEEPLPEGWEIRYTREGVR

SEQ ID NO: 615 - protein, 41 aa, Artificial sequence
  Synthetic
PTRAYLDQTVVPILLQGLAVLAKERPPNPIEFLASYLLKNK

SEQ ID NO: 616 - protein, 80 aa, Artificial sequence
  Synthetic
EYGLTDNVERIVENEKINAEKSSKQKVDLQSLPTRAYLDQTVVPILLQGLAVLAKERPPNPIEFLASYLLKNKAQFEDRN

SEQ ID NO: 617 - protein, 40 aa, Artificial sequence
  Synthetic
LQSEEDVSQFDTRFTRQTPVDSPDDTALSESANQAFLGFT

SEQ ID NO: 618 - protein, 80 aa, Artificial sequence
  Synthetic
HMNWDDLLAWRVDPPFRPCLQSEEDVSQFDTRFTRQTPVDSPDDTALSESANQAFLGFTYVAPSVLDSIKEGFSFQPKLR

SEQ ID NO: 619 - protein, 56 aa, Artificial sequence
  Synthetic
PCGACRSEVNDDQDAILCEASCQKWFHRECTGMTESAYGLLTTEASAVWACDLCLK

SEQ ID NO: 620 - protein, 80 aa, Artificial sequence
  Synthetic
SGPQPPPGLVYPCGACRSEVNDDQDAILCEASCQKWFHRECTGMTESAYGLLTTEASAVWACDLCLKTKEIQSVYIREGM

SEQ ID NO: 621 - protein, 59 aa, Artificial sequence
  Synthetic
FEEVFTELQEKYGEIEEMNVCDNLGDHLVGNVYVKFRREEDGERAVAELSNRWFNGQAV

SEQ ID NO: 622 - protein, 80 aa, Artificial sequence
  Synthetic
VEVQEHYDSFFEEVFTELQEKYGEIEEMNVCDNLGDHLVGNVYVKFRREEDGERAVAELSNRWFNGQAVHGELSPVTDFR

SEQ ID NO: 623 - protein, 29 aa, Artificial sequence
  Synthetic
LPPGWEQRVDQHGRVYYVDHVEKRTTWDR

SEQ ID NO: 624 - protein, 80 aa, Artificial sequence
  Synthetic
SGLIIPLTISGGSGPRPLNPVTQAPLPPGWEQRVDQHGRVYYVDHVEKRTTWDRPEPLPPGWERRVDNMGRIYYVDHFTR

SEQ ID NO: 625 - protein, 61 aa, Artificial sequence
  Synthetic
AYTDELVELHRRLMALRERNVLQQIVNLIEETGHFNVTNTTFDFDLFSLDETTVRKLQSCL

SEQ ID NO: 626 - protein, 80 aa, Artificial sequence
  Synthetic
SKPEKILKKGTYDKAYTDELVELHRRLMALRERNVLQQIVNLIEETGHFNVTNTTFDFDLFSLDETTVRKLQSCLEAVAT

SEQ ID NO: 627 - protein, 55 aa, Artificial sequence
  Synthetic
SQPVPEPDLPCDLRHLNTEPMEIFRNCVKIEEIMPNGDPLLAGQNTVDEVYVSRP

SEQ ID NO: 628 - protein, 80 aa, Artificial sequence
  Synthetic
SQTVPEPDQGPVSQPVPEPDLPCDLRHLNTEPMEIFRNCVKIEEIMPNGDPLLAGQNTVDEVYVSRPSHFYTDGPLMPSD

SEQ ID NO: 629 - protein, 34 aa, Artificial sequence
  Synthetic
EEACELPECQEDAGNKVCSLQCNNHACGWDGGDC

SEQ ID NO: 630 - protein, 80 aa, Artificial sequence
  Synthetic
LCHILDYSFGGGAGRDIPPPLIEEACELPECQEDAGNKVCSLQCNNHACGWDGGDCSLNFNDPWKNCTQSLQCWKYFSDG

SEQ ID NO: 631 - protein, 74 aa, Artificial sequence
  Synthetic
PNTILPEDSSTSLFKDLNSALAGLPEVSLNVDTPFPLEEELQIEPLSLDGLNMLSDSSMGLLDPSVEETFRADR

SEQ ID NO: 632 - protein, 80 aa, Artificial sequence
  Synthetic
NCGSLPNTILPEDSSTSLFKDLNSALAGLPEVSLNVDTPFPLEEELQIEPLSLDGLNMLSDSSMGLLDPSVEETFRADRL

SEQ ID NO: 633 - protein, 29 aa, Artificial sequence
  Synthetic
LPPGWSVDWTMRGRKYYIDHNTNTTHWSH

SEQ ID NO: 634 - protein, 80 aa, Artificial sequence
  Synthetic
HASGIGRVAATSLGNLTNHGSEDLPLPPGWSVDWTMRGRKYYIDHNTNTTHWSHPLEREGLPPGWERVESSEFGTYYVDH

SEQ ID NO: 635 - protein, 71 aa, Artificial sequence
  Synthetic
GEDFYREAIEHCRSYNARLCAERSLRLPFLDSQTGVAQNNCYIWMEKTHRGPGLAPGQIYTYPARCWRKKR

SEQ ID NO: 636 - protein, 80 aa, Artificial sequence
  Synthetic
PLSLGEDFYREAIEHCRSYNARLCAERSLRLPFLDSQTGVAQNNCYIWMEKTHRGPGLAPGQIYTYPARCWRKKRRLNIL

SEQ ID NO: 637 - protein, 46 aa, Artificial sequence
  Synthetic
VALYDFVASGDNTLSITKGEKLRVLGYNHNGEWCEAQTKNGQGWVP

SEQ ID NO: 638 - protein, 80 aa, Artificial sequence
  Synthetic
KENLLAGPSENDPNLFVALYDFVASGDNTLSITKGEKLRVLGYNHNGEWCEAQTKNGQGWVPSNYITPVNSLEKHSWYHG

SEQ ID NO: 639 - protein, 29 aa, Artificial sequence
  Synthetic
VKTVWVEGLSEDGFTYYYNTETGESRWEK

SEQ ID NO: 640 - protein, 80 aa, Artificial sequence
  Synthetic
YYDLISGASQWEKPEGFQGDLKKTAVKTVWVEGLSEDGFTYYYNTETGESRWEKPDDFIPHTSDLPSSKVNENSLGTLDE

SEQ ID NO: 641 - protein, 46 aa, Artificial sequence
  Synthetic
VALYDYMPMNANDLQLRKGDEYFILEESNLPWWRARDKNGQEGYIP

SEQ ID NO: 642 - protein, 80 aa, Artificial sequence
  Synthetic
PEPAAAPVSTSELKKVVALYDYMPMNANDLQLRKGDEYFILEESNLPWWRARDKNGQEGYIPSNYVTEAEDSIEMYEWYS

SEQ ID NO: 643 - protein, 45 aa, Artificial sequence
  Synthetic
TREWTEQETLLLLEALEMYKDDWNKVSEHVGSRTQDECILHFLRL

SEQ ID NO: 644 - protein, 80 aa, Artificial sequence
  Synthetic
MYTKKNVPSKSKAAASATREWTEQETLLLLEALEMYKDDWNKVSEHVGSRTQDECILHFLRLPIEDPYLEDSEASLGPLA

SEQ ID NO: 645 - protein, 37 aa, Artificial sequence
  Synthetic
CESCYATQSHQWYSWGPPNMQCRLCAICWLYWKKYGG

SEQ ID NO: 646 - protein, 80 aa, Artificial sequence
  Synthetic
GAVNGAVGTTFQPQNPLLGRACESCYATQSHQWYSWGPPNMQCRLCAICWLYWKKYGGLKMPTQSEEEKLSPSPTTEDPR

SEQ ID NO: 647 - protein, 29 aa, Artificial sequence
  Synthetic
LPPGWEMTFTATGQRYFLNHIEKITTWQD

SEQ ID NO: 648 - protein, 80 aa, Artificial sequence
  Synthetic
GAAGSPAQQHAHLRQQSYDVTDELPLPPGWEMTFTATGQRYFLNHIEKITTWQDPRKAMNQPLNHMNLHPAVSSTPVPQR

SEQ ID NO: 649 - protein, 69 aa, Artificial sequence
  Synthetic
GKFAFDSPSNWCQDNIISLMSAGILGVPPASGALSTQTSTASMVQPPQGDVEAMYPALPPYSNCGDLYS

SEQ ID NO: 650 - protein, 80 aa, Artificial sequence
  Synthetic
TVTYLGKFAFDSPSNWCQDNIISLMSAGILGVPPASGALSTQTSTASMVQPPQGDVEAMYPALPPYSNCGDLYSEPVSFH

SEQ ID NO: 651 - protein, 39 aa, Artificial sequence
  Synthetic
LTQDEFHPFIEALLPHVRAFSYTWFNLQARKRKYFKKHE

SEQ ID NO: 652 - protein, 80 aa, Artificial sequence
  Synthetic
YSPYCLTQDEFHPFIEALLPHVRAFSYTWFNLQARKRKYFKKHEKRMSKDEERAVKDELLGEKPEIKQKWASRLLAKLRK

SEQ ID NO: 653 - protein, 40 aa, Artificial sequence
  Synthetic
SGEFGLDNFDSQFTNEPVQLTPDDDDIVRKIDQSEFEGFE

SEQ ID NO: 654 - protein, 80 aa, Artificial sequence
  Synthetic
QGHPFFRNVDWDMMEQKQVVPPFKPNISGEFGLDNFDSQFTNEPVQLTPDDDDIVRKIDQSEFEGFEYINPLLMSAEECV

SEQ ID NO: 655 - protein, 68 aa, Artificial sequence
  Synthetic
MKLEAVDRRNPALIRVASVEDVEDHRIKIHFDGWSHGYDFWIDADHPDIHPAGWCSKTGHPLQPPLGP

SEQ ID NO: 656 - protein, 80 aa, Artificial sequence
  Synthetic
SFLVNMKLEAVDRRNPALIRVASVEDVEDHRIKIHFDGWSHGYDFWIDADHPDIHPAGWCSKTGHPLQPPLGPREPSSAS

SEQ ID NO: 657 - protein, 35 aa, Artificial sequence
  Synthetic
WKNCTQSLQCWKYFSDGHCDSQCNSAGCLFDGFDC

SEQ ID NO: 658 - protein, 80 aa, Artificial sequence
  Synthetic
LQCNNHACGWDGGDCSLNFNDPWKNCTQSLQCWKYFSDGHCDSQCNSAGCLFDGFDCQRAEGQCNPLYDQYCKDHFSDGH

SEQ ID NO: 659 - protein, 45 aa, Artificial sequence
  Synthetic
TDLSAIMPSQLRPVTYQDFENAFCKIQPSISQKELDMYVEWNKMF

SEQ ID NO: 660 - protein, 80 aa, Artificial sequence
  Synthetic
LLVQRTEGFSGLDVAHLCQEAVVGPLHAMPATDLSAIMPSQLRPVTYQDFENAFCKIQPSISQKELDMYVEWNKMFGCSQ

SEQ ID NO: 661 - protein, 51 aa, Artificial sequence
  Synthetic
NPYCALIEEAYGLDKIEFLQSHENQEIYQKAFDLIEHYFGTEDEDSSIAPQ

SEQ ID NO: 662 - protein, 80 aa, Artificial sequence
  Synthetic
RLGEQEAKRNGTGINPYCALIEEAYGLDKIEFLQSHENQEIYQKAFDLIEHYFGTEDEDSSIAPQVDLNQQQYIFQQCEA

SEQ ID NO: 663 - protein, 34 aa, Artificial sequence
  Synthetic
PFKDMILCFSEEDWSLLDPAQTGFYGEFIIGEDY

SEQ ID NO: 664 - protein, 80 aa, Artificial sequence
  Synthetic
QEENVRDTQQVTTLQLPPSRVSPFKDMILCFSEEDWSLLDPAQTGFYGEFIIGEDYGVSMPPNDLAAQPDLSQGEENEPR

SEQ ID NO: 665 - protein, 71 aa, Artificial sequence
  Synthetic
DAKSLEEESRTLVTFKDVFVDFTREEWKLLDTAQQIVYRNVMLENYKNLVSLGYQLTKPDVILRLEKGEEP

SEQ ID NO: 666 - protein, 71 aa, Artificial sequence
  Synthetic
DAKSLTAEEETLVTFKDVFVDFTREEWKLLDTAQQIVYRNVMLENYKNLVSLGYQLTKPDVILRLEKGEEP

SEQ ID NO: 667 - protein, 71 aa, Artificial sequence
  Synthetic
DAKSLTADDDTLVTFKDVFVDFTREEWKLLDTAQQIVYRNVMLENYKNLVSLGYQLTKPDVILRLEKGEEP

SEQ ID NO: 668 - protein, 71 aa, Artificial sequence
  Synthetic
DAKSLTAWSRTLVTFKDVFVDFTREEWKLLDTAQQIVYRNVMLENYKNLVSLGYQLTKPDVILRLEKIIIP

SEQ ID NO: 669 - protein, 71 aa, Artificial sequence
  Synthetic
DAKSLTPPPRTLVTFKDVFVDFTREEWKLLDTAQQIVYRNVMLENYKNLVSLGYQLTKPDVILRLEKGEEP

SEQ ID NO: 670 - protein, 71 aa, Artificial sequence
  Synthetic
DNKSLTAWSRTLVTFKDVFVDFTREEWKLLDTAQQIVYRNVMLENYKNLVSLGYQLTKPDVILRLEKGEEP

SEQ ID NO: 671 - protein, 71 aa, Artificial sequence
  Synthetic
DAKSLTAWSPPPVTFKDVFVDFTREEWKLLDTAQQIVYRNVMLENYKNLVSLGYQLTKPDVILRLEKGEEP

SEQ ID NO: 672 - protein, 71 aa, Artificial sequence
  Synthetic
DAKSLTEESRTLVTFKDVFVDFTREEWKLLDTAQQIVYRNVMLENYKNLVSLGYQLTKPDVILRLEKGEEP

SEQ ID NO: 673 - protein, 71 aa, Artificial sequence
  Synthetic
DAKSLTAAARTLVTFKDVFVDFTREEWKLLDTAQQIVYRNVMLENYKNLVSLGYQLTKPDVILRLEKGEEP

SEQ ID NO: 674 - protein, 71 aa, Artificial sequence
  Synthetic
DAKSVTAWSRTLVTFKDVFVDFTREEWKLLDTAQQIVYRNVMLENYKNLVSLGYQLTKPDVILRLEKGEEP

SEQ ID NO: 675 - protein, 71 aa, Artificial sequence
  Synthetic
DAKSLTAPSRTLVTFKDVFVDFTREEWKLLDTAQQIVYRNVMLENYKNLVSLGYQLTKPDVILRLEKGEEP

SEQ ID NO: 676 - protein, 71 aa, Artificial sequence
  Synthetic
DAKSLTAGGRTLVTFKDVFVDFTREEWKLLDTAQQIVYRNVMLENYKNLVSLGYQLTKPDVILRLEKGEEP

SEQ ID NO: 677 - protein, 71 aa, Artificial sequence
  Synthetic
DAKSLNNNSRTLVTFKDVFVDFTREEWKLLDTAQQIVYRNVMLENYKNLVSLGYQLTKPDVILRLEKGEEP

SEQ ID NO: 678 - protein, 71 aa, Artificial sequence
  Synthetic
DAKSLTAQQQTLVTFKDVFVDFTREEWKLLDTAQQIVYRNVMLENYKNLVSLGYQLTKPDVILRLEKGEEP

SEQ ID NO: 679 - protein, 71 aa, Artificial sequence
  Synthetic
DAKSLTAWSRPPVTFKDVFVDFTREEWKLLDTAQQIVYRNVMLENYKNLVSLGYQLTKPDVILRLEKGEEP

SEQ ID NO: 680 - protein, 71 aa, Artificial sequence
  Synthetic
DAKSLTATTRTLVTFKDVFVDFTREEWKLLDTAQQIVYRNVMLENYKNLVSLGYQLTKPDVILRLEKGEEP

SEQ ID NO: 681 - protein, 71 aa, Artificial sequence
  Synthetic
DAKSLTAWSREEVTFKDVFVDFTREEWKLLDTAQQIVYRNVMLENYKNLVSLGYQLTKPDVILRLEKGEEP

SEQ ID NO: 682 - protein, 71 aa, Artificial sequence
  Synthetic
DAKSLTADDRTLVTFKDVFVDFTREEWKLLDTAQQIVYRNVMLENYKNLVSLGYQLTKPDVILRLEKGEEP

SEQ ID NO: 683 - protein, 71 aa, Artificial sequence
  Synthetic
DAKSLTQQQRTLVTFKDVFVDFTREEWKLLDTAQQIVYRNVMLENYKNLVSLGYQLTKPDVILRLEKGEEP

SEQ ID NO: 684 - protein, 71 aa, Artificial sequence
  Synthetic
DAKSEEEWSRTLVTFKDVFVDFTREEWKLLDTAQQIVYRNVMLENYKNLVSLGYQLTKPDVILRLEKGEEP

SEQ ID NO: 685 - protein, 71 aa, Artificial sequence
  Synthetic
DAKSLTDDSRTLVTFKDVFVDFTREEWKLLDTAQQIVYRNVMLENYKNLVSLGYQLTKPDVILRLEKGEEP

SEQ ID NO: 686 - protein, 71 aa, Artificial sequence
  Synthetic
DAKSLTANNRTLVTFKDVFVDFTREEWKLLDTAQQIVYRNVMLENYKNLVSLGYQLTKPDVILRLEKGEEP

SEQ ID NO: 687 - protein, 71 aa, Artificial sequence
  Synthetic
NNNSLTAWSRTLVTFKDVFVDFTREEWKLLDTAQQIVYRNVMLENYKNLVSLGYQLTKPDVILRLEKGEEP

SEQ ID NO: 688 - protein, 71 aa, Artificial sequence
  Synthetic
DAKSLGGGSRTLVTFKDVFVDFTREEWKLLDTAQQIVYRNVMLENYKNLVSLGYQLTKPDVILRLEKGEEP

SEQ ID NO: 689 - protein, 71 aa, Artificial sequence
  Synthetic
DAKSLTDDDRTLVTFKDVFVDFTREEWKLLDTAQQIVYRNVMLENYKNLVSLGYQLTKPDVILRLEKGEEP

SEQ ID NO: 690 - protein, 71 aa, Artificial sequence
  Synthetic
DAKSLDDDSRTLVTFKDVFVDFTREEWKLLDTAQQIVYRNVMLENYKNLVSLGYQLTKPDVILRLEKGEEP

SEQ ID NO: 691 - protein, 71 aa, Artificial sequence
  Synthetic
DAKSLTAWSRTLVTFKDVFVDFTREEWKLLDTAQQIVYRNVMLENYKNLVSLGYQLTKPDVIKKLEKGEEP

SEQ ID NO: 692 - protein, 71 aa, Artificial sequence
  Synthetic
DAKSLTADSRTLVTFKDVFVDFTREEWKLLDTAQQIVYRNVMLENYKNLVSLGYQLTKPDVILRLEKGEEP

SEQ ID NO: 693 - protein, 71 aa, Artificial sequence
  Synthetic
DAKSLKKKSRTLVTFKDVFVDFTREEWKLLDTAQQIVYRNVMLENYKNLVSLGYQLTKPDVILRLEKGEEP

SEQ ID NO: 694 - protein, 71 aa, Artificial sequence
  Synthetic
DAKSLTAESRTLVTFKDVFVDFTREEWKLLDTAQQIVYRNVMLENYKNLVSLGYQLTKPDVILRLEKGEEP

SEQ ID NO: 695 - protein, 71 aa, Artificial sequence
  Synthetic
DAKSLTAPPRTLVTFKDVFVDFTREEWKLLDTAQQIVYRNVMLENYKNLVSLGYQLTKPDVILRLEKGEEP

SEQ ID NO: 696 - protein, 71 aa, Artificial sequence
  Synthetic
DAKSLTAPPPTLVTFKDVFVDFTREEWKLLDTAQQIVYRNVMLENYKNLVSLGYQLTKPDVILRLEKGEEP

SEQ ID NO: 697 - protein, 71 aa, Artificial sequence
  Synthetic
DAKSLTAWDDTLVTFKDVFVDFTREEWKLLDTAQQIVYRNVMLENYKNLVSLGYQLTKPDVILRLEKGEEP

SEQ ID NO: 698 - protein, 71 aa, Artificial sequence
  Synthetic
DAKSLTANNNTLVTFKDVFVDFTREEWKLLDTAQQIVYRNVMLENYKNLVSLGYQLTKPDVILRLEKGEEP

SEQ ID NO: 699 - protein, 71 aa, Artificial sequence
  Synthetic
DAKSLTAMSRTLVTFKDVFVDFTREEWKLLDTAQQIVYRNVMLENYKNLVSLGYQLTKPDVILRLEKGEEP

SEQ ID NO: 700 - protein, 71 aa, Artificial sequence
  Synthetic
DAKSLTAWNNNLVTFKDVFVDFTREEWKLLDTAQQIVYRNVMLENYKNLVSLGYQLTKPDVILRLEKGEEP

SEQ ID NO: 701 - protein, 71 aa, Artificial sequence
  Synthetic
DAKSLTAWSNNLVTFKDVFVDFTREEWKLLDTAQQIVYRNVMLENYKNLVSLGYQLTKPDVILRLEKGEEP

SEQ ID NO: 702 - protein, 71 aa, Artificial sequence
  Synthetic
DAKSLTPPSRTLVTFKDVFVDFTREEWKLLDTAQQIVYRNVMLENYKNLVSLGYQLTKPDVILRLEKGEEP

SEQ ID NO: 703 - protein, 71 aa, Artificial sequence
  Synthetic
DAKSLTEEERTLVTFKDVFVDFTREEWKLLDTAQQIVYRNVMLENYKNLVSLGYQLTKPDVILRLEKGEEP

SEQ ID NO: 704 - protein, 71 aa, Artificial sequence
  Synthetic
DAKSLAAASRTLVTFKDVFVDFTREEWKLLDTAQQIVYRNVMLENYKNLVSLGYQLTKPDVILRLEKGEEP

SEQ ID NO: 705 - protein, 71 aa, Artificial sequence
  Synthetic
DAKSLTAQQRTLVTFKDVFVDFTREEWKLLDTAQQIVYRNVMLENYKNLVSLGYQLTKPDVILRLEKGEEP

SEQ ID NO: 706 - protein, 71 aa, Artificial sequence
  Synthetic
DAKSLTAWSEEEVTFKDVFVDFTREEWKLLDTAQQIVYRNVMLENYKNLVSLGYQLTKPDVILRLEKGEEP

SEQ ID NO: 707 - protein, 71 aa, Artificial sequence
  Synthetic
DAKSLTQQSRTLVTFKDVFVDFTREEWKLLDTAQQIVYRNVMLENYKNLVSLGYQLTKPDVILRLEKGEEP

SEQ ID NO: 708 - protein, 71 aa, Artificial sequence
  Synthetic
DAKSLTAWSRTLVTFKDVFVDFTREEWKLLDTAQQIVYREVMLENYKNLVSLGYQLTKPDVILRLEKGEEP

SEQ ID NO: 709 - protein, 71 aa, Artificial sequence
  Synthetic
DAKSLTAWSRPLVTFKDVFVDFTREEWKLLDTAQQIVYRNVMLENYKNLVSLGYQLTKPDVILRLEKGEEP

SEQ ID NO: 710 - protein, 71 aa, Artificial sequence
  Synthetic
DAKSTTAWSRTLVTFKDVFVDFTREEWKLLDTAQQIVYRNVMLENYKNLVSLGYQLTKPDVILRLEKGEEP

SEQ ID NO: 711 - protein, 71 aa, Artificial sequence
  Synthetic
DAKSLTAWSNNNVTFKDVFVDFTREEWKLLDTAQQIVYRNVMLENYKNLVSLGYQLTKPDVILRLEKGEEP

SEQ ID NO: 712 - protein, 71 aa, Artificial sequence
  Synthetic
DAKSLTAWDDDLVTFKDVFVDFTREEWKLLDTAQQIVYRNVMLENYKNLVSLGYQLTKPDVILRLEKGEEP

SEQ ID NO: 713 - protein, 71 aa, Artificial sequence
  Synthetic
DAKSLTAASRTLVTFKDVFVDFTREEWKLLDTAQQIVYRNVMLENYKNLVSLGYQLTKPDVILRLEKGEEP

SEQ ID NO: 714 - protein, 71 aa, Artificial sequence
  Synthetic
DAKSLTAGSRTLVTFKDVFVDFTREEWKLLDTAQQIVYRNVMLENYKNLVSLGYQLTKPDVILRLEKGEEP

SEQ ID NO: 715 - protein, 71 aa, Artificial sequence
  Synthetic
DAKSLTASSRTLVTFKDVFVDFTREEWKLLDTAQQIVYRNVMLENYKNLVSLGYQLTKPDVILRLEKGEEP

SEQ ID NO: 716 - protein, 71 aa, Artificial sequence
  Synthetic
DAKSLTSSSRTLVTFKDVFVDFTREEWKLLDTAQQIVYRNVMLENYKNLVSLGYQLTKPDVILRLEKGEEP

SEQ ID NO: 717 - protein, 71 aa, Artificial sequence
  Synthetic
DAKDDTAWSRTLVTFKDVFVDFTREEWKLLDTAQQIVYRNVMLENYKNLVSLGYQLTKPDVILRLEKGEEP

SEQ ID NO: 718 - protein, 71 aa, Artificial sequence
  Synthetic
DAKSLTAWSRTLVTFKDVFVDFTREEWKLLDTAQQIVYRNVMLENYKNLVSLGYQHTKPDVILRLEKGEEP

SEQ ID NO: 719 - protein, 71 aa, Artificial sequence
  Synthetic
DAKSLTKKSRTLVTFKDVFVDFTREEWKLLDTAQQIVYRNVMLENYKNLVSLGYQLTKPDVILRLEKGEEP

SEQ ID NO: 720 - protein, 71 aa, Artificial sequence
  Synthetic
DAKSLTAWSEELVTFKDVFVDFTREEWKLLDTAQQIVYRNVMLENYKNLVSLGYQLTKPDVILRLEKGEEP

SEQ ID NO: 721 - protein, 71 aa, Artificial sequence
  Synthetic
DAKSLTAWQQQLVTFKDVFVDFTREEWKLLDTAQQIVYRNVMLENYKNLVSLGYQLTKPDVILRLEKGEEP

SEQ ID NO: 722 - protein, 71 aa, Artificial sequence
  Synthetic
DAKSLTAWSRTTVTFKDVFVDFTREEWKLLDTAQQIVYRNVMLENYKNLVSLGYQLTKPDVILRLEKGEEP

SEQ ID NO: 723 - protein, 71 aa, Artificial sequence
  Synthetic
DAKSLTANSRTLVTFKDVFVDFTREEWKLLDTAQQIVYRNVMLENYKNLVSLGYQLTKPDVILRLEKGEEP

SEQ ID NO: 724 - protein, 71 aa, Artificial sequence
  Synthetic
DAKSLQQQSRTLVTFKDVFVDFTREEWKLLDTAQQIVYRNVMLENYKNLVSLGYQLTKPDVILRLEKGEEP

SEQ ID NO: 725 - protein, 71 aa, Artificial sequence
  Synthetic
DAKSLTAWPPTLVTFKDVFVDFTREEWKLLDTAQQIVYRNVMLENYKNLVSLGYQLTKPDVILRLEKGEEP

SEQ ID NO: 726 - protein, 71 aa, Artificial sequence
  Synthetic
DAKEEEAWSRTLVTFKDVFVDFTREEWKLLDTAQQIVYRNVMLENYKNLVSLGYQLTKPDVILRLEKGEEP

SEQ ID NO: 727 - protein, 71 aa, Artificial sequence
  Synthetic
DAKSLTNNSRTLVTFKDVFVDFTREEWKLLDTAQQIVYRNVMLENYKNLVSLGYQLTKPDVILRLEKGEEP

SEQ ID NO: 728 - protein, 71 aa, Artificial sequence
  Synthetic
DAKSLTAWSRTDVTFKDVFVDFTREEWKLLDTAQQIVYRNVMLENYKNLVSLGYQLTKPDVILRLEKGEEP

SEQ ID NO: 729 - protein, 71 aa, Artificial sequence
  Synthetic
DAKSLTATTTTLVTFKDVFVDFTREEWKLLDTAQQIVYRNVMLENYKNLVSLGYQLTKPDVILRLEKGEEP

SEQ ID NO: 730 - protein, 71 aa, Artificial sequence
  Synthetic
DAKSLTAWSDDLVTFKDVFVDFTREEWKLLDTAQQIVYRNVMLENYKNLVSLGYQLTKPDVILRLEKGEEP

SEQ ID NO: 731 - protein, 71 aa, Artificial sequence
  Synthetic
DAKSLTAKSRTLVTFKDVFVDFTREEWKLLDTAQQIVYRNVMLENYKNLVSLGYQLTKPDVILRLEKGEEP

SEQ ID NO: 732 - protein, 71 aa, Artificial sequence
  Synthetic
DAKSLTAWSRTLVTFEDVFVDFTREEWKLLDTAQQIVYRNVMLENYKNLVSLGYQLTKPDVILRLEKGEEP

SEQ ID NO: 733 - protein, 71 aa, Artificial sequence
  Synthetic
DAKSLTAWSRTLVTFDDVFVDFTREEWKLLDTAQQIVYRNVMLENYKNLVSLGYQLTKPDVILRLEKGEEP

SEQ ID NO: 734 - protein, 71 aa, Artificial sequence; identical to SEQ ID NO: 733
  Synthetic

SEQ ID NO: 735 - protein, 71 aa, Artificial sequence
  Synthetic
DAKSLTAWSQQQVTFKDVFVDFTREEWKLLDTAQQIVYRNVMLENYKNLVSLGYQLTKPDVILRLEKGEEP

SEQ ID NO: 736 - protein, 71 aa, Artificial sequence
  Synthetic
DAKSLTAWSRTLVTFKDVFVDFTREEWKLLDTAQQIVYRNVMLENYKNLVELGYQLTKPDVILRLEKGEEP

SEQ ID NO: 737 - protein, 71 aa, Artificial sequence
  Synthetic
DAKSLTAWEEELVTFKDVFVDFTREEWKLLDTAQQIVYRNVMLENYKNLVSLGYQLTKPDVILRLEKGEEP

SEQ ID NO: 738 - protein, 71 aa, Artificial sequence
  Synthetic
DAKSLTAWSRTLVTFKDVFVDFTREEWKLLDTAQQEVYRNVMLENYKNLVSLGYQLTKPDVILRLEKGEEP

SEQ ID NO: 739 - protein, 71 aa, Artificial sequence
  Synthetic
DAKSLTAWSRTPVTFKDVFVDFTREEWKLLDTAQQIVYRNVMLENYKNLVSLGYQLTKPDVILRLEKGEEP

SEQ ID NO: 740 - protein, 71 aa, Artificial sequence
  Synthetic
DAKSLTAWSRTLVTFKDVFVDFTREEWKLLDTAQQIVYRNVMLENYKNLVSLGYEEEKPDVILRLEKGEEP

SEQ ID NO: 741 - protein, 71 aa, Artificial sequence
  Synthetic
DAKSLTAWSRTLVTFKDVFVDFTREEWKLLDTAQQDDYRNVMLENYKNLVSLGYQLTKPDVILRLEKGEEP

SEQ ID NO: 742 - protein, 71 aa, Artificial sequence; identical to SEQ ID NO: 673
  Synthetic

SEQ ID NO: 743 - protein, 71 aa, Artificial sequence
  Synthetic
DAKSLTAQSRTLVTFKDVFVDFTREEWKLLDTAQQIVYRNVMLENYKNLVSLGYQLTKPDVILRLEKGEEP

SEQ ID NO: 744 - protein, 71 aa, Artificial sequence
  Synthetic
DAKSLTAAAATLVTFKDVFVDFTREEWKLLDTAQQIVYRNVMLENYKNLVSLGYQLTKPDVILRLEKGEEP

SEQ ID NO: 745 - protein, 71 aa, Artificial sequence
  Synthetic
DAKSLKKWSRTLVTFKDVFVDFTREEWKLLDTAQQIVYRNVMLENYKNLVSLGYQLTKPDVILRLEKGEEP

SEQ ID NO: 746 - protein, 71 aa, Artificial sequence
  Synthetic
DAKSLTAGGGTLVTFKDVFVDFTREEWKLLDTAQQIVYRNVMLENYKNLVSLGYQLTKPDVILRLEKGEEP

SEQ ID NO: 747 - protein, 71 aa, Artificial sequence
  Synthetic
DDDSLTAWSRTLVTFKDVFVDFTREEWKLLDTAQQIVYRNVMLENYKNLVSLGYQLTKPDVILRLEKGEEP

SEQ ID NO: 748 - protein, 71 aa, Artificial sequence
  Synthetic
DAKSLTAWSRTLVTFKDVFVDFTREEWKLLDTQQQIVYRNVMLENYKNLVSLGYQLTKPDVILRLEKGEEP

SEQ ID NO: 749 - protein, 71 aa, Artificial sequence
  Synthetic
DAKSLTAWSRTLVTFKDVFVDFTREEWKLLDTAQQIVYRNVMLENYKNLVSLGYQLTKPDVILRLEKGEYY

SEQ ID NO: 750 - protein, 71 aa, Artificial sequence
  Synthetic
DAKSLTAEERTLVTFKDVFVDFTREEWKLLDTAQQIVYRNVMLENYKNLVSLGYQLTKPDVILRLEKGEEP

SEQ ID NO: 751 - protein, 71 aa, Artificial sequence
  Synthetic
DAKSLTAHSRTLVTFKDVFVDFTREEWKLLDTAQQIVYRNVMLENYKNLVSLGYQLTKPDVILRLEKGEEP

SEQ ID NO: 752 - protein, 71 aa, Artificial sequence
  Synthetic
DAKSLRRWSRTLVTFKDVFVDFTREEWKLLDTAQQIVYRNVMLENYKNLVSLGYQLTKPDVILRLEKGEEP

SEQ ID NO: 753 - protein, 71 aa, Artificial sequence
  Synthetic
DAKSLTAWSSSSVTFKDVFVDFTREEWKLLDTAQQIVYRNVMLENYKNLVSLGYQLTKPDVILRLEKGEEP

SEQ ID NO: 754 - protein, 71 aa, Artificial sequence
  Synthetic
DAKSLTAWSRTLVTFKDVFVDFTREEWKLLDTAQQIVYRNVMLENYKNLVSLGWQLTKPDVILRLEKGEEP

SEQ ID NO: 755 - protein, 71 aa, Artificial sequence
  Synthetic
DSSSLTAWSRTLVTFKDVFVDFTREEWKLLDTAQQIVYRNVMLENYKNLVSLGYQLTKPDVILRLEKGEEP

SEQ ID NO: 756 - protein, 71 aa, Artificial sequence
  Synthetic
DAKSLTAWSRTLVTFKDVFVDFTREEWKLLDTAQKKVYRNVMLENYKNLVSLGYQLTKPDVILRLEKGEEP

SEQ ID NO: 757 - protein, 71 aa, Artificial sequence
  Synthetic
DAKSLTAKKKTLVTFKDVFVDFTREEWKLLDTAQQIVYRNVMLENYKNLVSLGYQLTKPDVILRLEKGEEP

SEQ ID NO: 758 - protein, 71 aa, Artificial sequence
  Synthetic
DAKSLTAWSGGGVTFKDVFVDFTREEWKLLDTAQQIVYRNVMLENYKNLVSLGYQLTKPDVILRLEKGEEP

SEQ ID NO: 759 - protein, 71 aa, Artificial sequence
  Synthetic
DAKSLTAWSDDDVTFKDVFVDFTREEWKLLDTAQQIVYRNVMLENYKNLVSLGYQLTKPDVILRLEKGEEP

SEQ ID NO: 760 - protein, 71 aa, Artificial sequence
  Synthetic
DAKTTTAWSRTLVTFKDVFVDFTREEWKLLDTAQQIVYRNVMLENYKNLVSLGYQLTKPDVILRLEKGEEP

SEQ ID NO: 761 - protein, 71 aa, Artificial sequence
  Synthetic
DAKSLTAWGGGLVTFKDVFVDFTREEWKLLDTAQQIVYRNVMLENYKNLVSLGYQLTKPDVILRLEKGEEP

SEQ ID NO: 762 - protein, 71 aa, Artificial sequence
  Synthetic
DAKSLTAWSRELVTFKDVFVDFTREEWKLLDTAQQIVYRNVMLENYKNLVSLGYQLTKPDVILRLEKGEEP

SEQ ID NO: 763 - protein, 71 aa, Artificial sequence
  Synthetic
DAKSDDDWSRTLVTFKDVFVDFTREEWKLLDTAQQIVYRNVMLENYKNLVSLGYQLTKPDVILRLEKGEEP

SEQ ID NO: 764 - protein, 71 aa, Artificial sequence
  Synthetic
DAKSLSSSSRTLVTFKDVFVDFTREEWKLLDTAQQIVYRNVMLENYKNLVSLGYQLTKPDVILRLEKGEEP

SEQ ID NO: 765 - protein, 71 aa, Artificial sequence
  Synthetic
DAKSLTASSSTLVTFKDVFVDFTREEWKLLDTAQQIVYRNVMLENYKNLVSLGYQLTKPDVILRLEKGEEP

SEQ ID NO: 766 - protein, 80 aa, Artificial sequence
  Synthetic
MMTAVSLTTRPQESVAFEDVAVYFTTKEWAIMVPAERALYRDVMLENYEAVAFVVPPTSKPALVSHLEQGKESCFTQPQG

SEQ ID NO: 767 - protein, 80 aa, Artificial sequence
  Synthetic
MAHELVMFRDVAIDVSQEEWECLNPAQRNLYKEVMLENYSNLVSLGLSVSKPAVISSLEQGKEPWMVVREETGRWCPGTW

SEQ ID NO: 768 - protein, 80 aa, Artificial sequence
  Synthetic
MSCSGAGGITAFVAFRDVAVYFTQEEWRLLSPAQRTLHREVMLETYNHLVSLEIPSSKPKLIAQLERGEAPWREERKCPL

SEQ ID NO: 769 - protein, 80 aa, Artificial sequence
  Synthetic
MDSVVFEDVAVDFTLEEWALLDSAQRDLYRDVMLETFRNLASVDDGTQFKANGSVSLQDMYGQEKSKEQTIPNFTGNNSC

SEQ ID NO: 770 - protein, 80 aa, Artificial sequence
  Synthetic
NDIARGFERGLEPEKIIGATDSCGDLMFLMKWKDTDEADLVLAKEANVKCPQIVIAFYEERLTWHAYPEDAENKEKETAK

SEQ ID NO: 771 - protein, 80 aa, Artificial sequence; identical to SEQ ID NO: 438
  Synthetic

SEQ ID NO: 772 - protein, 80 aa, Artificial sequence
  Synthetic
KKKKEESEKPRGFARGLEPERIIGATDSSGELMFLMKWKNSDEADLVPAKEANVKCPQVVISFYEERLTWHSYPSEDDDK

SEQ ID NO: 773 - protein, 80 aa, Artificial sequence
  Synthetic
PVTVPVATTSVEELQGAYENEVSKEGLAESEPMICHTLPLPEGFQVVKVGANGEVETLEQGELPPQEDPSWQKDPDYQPP

SEQ ID NO: 774 - protein, 80 aa, Artificial sequence
  Synthetic
PPSEANSIQSANATTKTSETNHTSRPRLKNVDRSTAQQLAVTVGNVTVIITDFKEKTRSSSTSSSTVTSSAGSEQQNQSS

SEQ ID NO: 775 - protein, 80 aa, Artificial sequence
  Synthetic
MASVQASRRQWCYLCDLPKMPWAMVWDFSEAVCRGCVNFEGADRIELLIDAARQLKRSHVLPEGRSPGPPALKHPATKDL

SEQ ID NO: 776 - protein, 80 aa, Artificial sequence
  Synthetic
PHTSANLVMTPQGQLLTLKGPLFSGPVVAVSPDLLESDLKPQVAGSAVALPENDDLFMMPRIVNVTSLATEGGLVDMGGS

SEQ ID NO: 777 - protein, 80 aa, Artificial sequence
  Synthetic
ELFLQEPPAPDVLQAAGEWEPAAQPPEEEADADLAEGPPPWTPALPSSEVTVTDITANSITVTFREAQAAEGFFRDRSGK

SEQ ID NO: 778 - protein, 80 aa, Artificial sequence
  Synthetic
TPSIGNSQPSTPAPALPVQDPQLLHHCQHCDMYFADNILYTIHMGCHGYENPFQCNICGCKCKNKYDFACHFARGQHNQH

SEQ ID NO: 779 - protein, 80 aa, Artificial sequence
  Synthetic
IHSHEGSDLSDNMSEGSDDSGLHGARPVPQESSRKNAKEALAVKAAKGDFVCIFCDRSFRKGKDYSKHLNRHLVNVYYLE

SEQ ID NO: 780 - protein, 80 aa, Artificial sequence; identical to SEQ ID NO: 504
  Synthetic

SEQ ID NO: 781 - protein, 80 aa, Artificial sequence
  Synthetic
APFKEEEKSPVSAPKLPKAQATSVIRHTADAQLCNHQTCPMKAASILNYQNNSFRRRTHLNVEAARKNIPCAAVSPNRSK

SEQ ID NO: 782 - protein, 80 aa, Artificial sequence; identical to SEQ ID NO: 532
  Synthetic

SEQ ID NO: 783 - protein, 80 aa, Artificial sequence; identical to SEQ ID NO: 554
  Synthetic

SEQ ID NO: 784 - protein, 80 aa, Artificial sequence
  Synthetic
GSGSESGKERRTTSKEISVIQHTSSFEKSDSLEQPSGLEGEDKPLAQFPSPPPAPHGRSAHSLQPKLVRQPNIQVPEILV

SEQ ID NO: 785 - protein, 80 aa, Artificial sequence
  Synthetic
SSAQKVQIKQETIESRLSELKSENESLWKEVSELRAKHAQQQQVIRKIVQFIVTLVQNNQLVSLKRKRPLLLNTNGAQKK

SEQ ID NO: 786 - protein, 80 aa, Artificial sequence
  Synthetic
TSPVLVPGCPSKAVDPGLPSVKQEPPDPEEDKEENKDDSASKLAPEEEAGGAGTPVITEIFSLGGTRFRDTAVWLPRSKD

SEQ ID NO: 787 - protein, 80 aa, Artificial sequence
  Synthetic
GQDSEQPQAQLQPEAQLHAPAQPQPQLQLQLQSHKGFLEQEGSPLSLGQSQHDLSQSAFLSWLSQTQSHSSLLSSSVLTP

SEQ ID NO: 788 - protein, 80 aa, Artificial sequence
  Synthetic
EIILCDTCPRAYHMVCLDPDMEKAPEGKWSCPHCEKEGIQWEAKEDNSEGEEILEEVGGDLEEEDDHHMEFCRVCKDGGE

SEQ ID NO: 789 - protein, 80 aa, Artificial sequence
  Synthetic
DSSGVIDLTMDDEESGASQDPKKLNHTPVSTMSSSQPVSRPLQPIQPAPPLQPSGVPTSGPSQTTIHLLPTAPTTVNVTH

SEQ ID NO: 790 - protein, 80 aa, Artificial sequence
  Synthetic
MHRTTRIKITELNPHLMCALCGGYFIDATTIVECLHSFCKTCIVRYLETNKYCPMCDVQVHKTRPLLSIRSDKTLQDIVY

SEQ ID NO: 791 - protein, 80 aa, Artificial sequence
  Synthetic
KIRQDSVTKLLTDVQLMKGKQECMDSKLLAMKHENEALWREVASLRQKHAQQQKVVNKLIQFLISLVQSNRILGVKRKIP

SEQ ID NO: 792 - protein, 80 aa, Artificial sequence
  Synthetic
LQQKLEEVRQPPPRVRPVPSLVPRPPQTSLVKFVGNIYTLKCRFCEVEFQGPLSIQEEWVRHLQRHILEMNFSKADPPPE

SEQ ID NO: 793 - protein, 80 aa, Artificial sequence
  Synthetic
MELSAIGEQVFAVESIRKKRVRKGKVEYLVKWKGWPPKYSTWEPEEHILDPRLVMAYEEKEERDRASGYRKRGPKPKRLL

SEQ ID NO: 794 - protein, 80 aa, Artificial sequence
  Synthetic
CGGRQDPDKQLMCDECDMAFHIYCLDPPLSSVPSEDEWYCPECRNDASEVVLAGERLRESKKKAKMASATSSSQRDWGKG

SEQ ID NO: 795 - protein, 80 aa, Artificial sequence
  Synthetic
ALSEVPQLKQEISECLIASSFEDDSRVASPLDQNGSFNVVIKEEPLDDYDYELGECPEGVTVKQEETDEETDVYSNSDDD

SEQ ID NO: 796 - protein, 80 aa, Artificial sequence
  Synthetic
SAGHEKLPVHVEDALTYLDQVKIRFGSDPATYNGFLEIMKEFKSQSIDTPGVIRRVSQLFHEHPDLIVGFNAFLPLGYRI

SEQ ID NO: 797 - protein, 80 aa, Artificial sequence
  Synthetic
TSTQVMVIKRPGRKRKAEADPQAIPKKRGRKPGSVVAAAAAEAKKKAVKESSIRSVQETVLPIKKRKTRETVSIEVKEVV

SEQ ID NO: 798 - protein, 80 aa, Artificial sequence
  Synthetic
MDSLEEPQKKVFKARKTMRVSDRQQLEAVYKVKEELLKTDVKLLNGNHENGDLDPTSPLENMDYIKDKEEVNGIEEICFD

SEQ ID NO: 799 - protein, 80 aa, Artificial sequence
  Synthetic
CHKKFRRQAYLRKHLSTHEAGSARALAPGFGSERGAPLAFACPLCGAHFPTADIREKHRLWHAVREELLLPALAGAPPET

SEQ ID NO: 800 - protein, 80 aa, Artificial sequence
  Synthetic
LLDSSNSSASASQAMNIKIEPEETTEARTHNLRRRMGCPTPKCENEKEMKSSIKQEPIERKDYIVENEKEKPKSRSKKAT

SEQ ID NO: 801 - protein, 80 aa, Artificial sequence
  Synthetic
PVSGSSPFATQVGVIRCPVCSQECAERHIIDNFFVKDTTEVPSSTVEKSNQVCTSCEDNAEANGFCVECVEWLCKTCIRA

SEQ ID NO: 802 - protein, 80 aa, Artificial sequence
  Synthetic
MAEDWLDCPALGPGWKRREVFRKSGATCGRSDTYYQSPTGDRIRSKVELTRYLGPACDLTLFDFKQGILCYPAPKAHPVA

SEQ ID NO: 803 - protein, 80 aa, Artificial sequence
  Synthetic
PVQGQQQFQRLKVEDALSYLDQVKLQFGSQPQVYNDFLDIMKEFKSQSIDTPGVISRVSQLFKGHPDLIMGFNTFLPPGY

SEQ ID NO: 804 - protein, 80 aa, Artificial sequence
  Synthetic
RAKQPDLAPGLTTIGASPTQTVTLVTQPVVTKETAISKLEMPSSLMLEVPALADFNRAWTELTDWLSLLDQVIKSQRVMV

SEQ ID NO: 805 - protein, 80 aa, Artificial sequence
  Synthetic
HMRCHQHFLRTEAKVKEEIPDPDVKGSPHLSDSACLGQQREGGGTELVGTMMTSNTPERTSQGGAGVSPLLVKEEPKEDN

SEQ ID NO: 806 - protein, 80 aa, Artificial sequence
  Synthetic
QRQTIVIPDTPSPTVSVITISSDTDEEEEQKHAPTSTVSKQRKNVISCVTVHDSPYSDSSSNTSPYSVQQRAGHNNANAF

SEQ ID NO: 807 - protein, 80 aa, Artificial sequence
  Synthetic
SGDGTQRQRLKTLCKDCRAQRIAFNREQRMFKRVGCGECAACQVTEDCGACSTCLLQLPHDVASGLFCKCERRRCLRIVE

SEQ ID NO: 808 - protein, 80 aa, Artificial sequence
  Synthetic
KMAEKAREKEEECEKYGPDYVPQKSHGKKVKREPAEPHETSEPTYLRFIKSLAERTMSVTTDSTVTTSPYAFTRVTGPYN

SEQ ID NO: 809 - protein, 80 aa, Artificial sequence
  Synthetic
GSGPPSSGGGLYRDMGAQGGRPSLIARIPVARILGDPEEESWSPSLTNLEKVVVTDVTSNFLTVTIKESNTDQGFFKEKR

SEQ ID NO: 810 - protein, 80 aa, Artificial sequence
  Synthetic
GSTMDSAGLGQEAPALFRPCTPAVWAPAPAAGGPRSPPPLLLLPESLPGSSASVPPPQPASSRCAESPGLGLRVWRPWGS

SEQ ID NO: 811 - protein, 80 aa, Artificial sequence
  Synthetic
EDGHAISTIKEEPKIDFRVYNLLTPDSKMGEPVSESVVKREKLEEKDGLKEKVWTESSSDDLRNVTWRGADILRGSPSYT

SEQ ID NO: 812 - protein, 80 aa, Artificial sequence
  Synthetic
VGSRGSSGSSSKPAGADSTHKVPVVMLEPIRIKQENSGPPENYDFPVVIVKQESDEESRPQNANYPRSILTSLLLNSSQS

SEQ ID NO: 813 - protein, 80 aa, Artificial sequence
  Synthetic
NEGDQPKTPENIPSKEPKDGSPVQPSLLSLMKDRRLTLEQVVAIEALTQLSEAPSENSSPSKSEKDEESEQRTASLLNSC

SEQ ID NO: 814 - protein, 80 aa, Artificial sequence
  Synthetic
CRKGDNEELLLLCDGCDKGCHTYCHRPKITTIPDGDWFCPACIAKASGQTLKIKKLHVKGKKTNESKKGKKVTLTGDTED

SEQ ID NO: 815 - protein, 80 aa, Artificial sequence
  Synthetic
SDEQKIKPVTENLVLSSHTGFCQSSGDEALSKSVPVTVDDDDDDNDPENRIAKKMLLEEIKANLSSDEDGSSDDEPEEGK

SEQ ID NO: 816 - protein, 80 aa, Artificial sequence
  Synthetic
QQHKVLQEDLEQEQVRVNSLTHMVVVVDESSGDHATAALEEQLKVLGDRWANICRWTEDRWVLLQDILLKWQRLTEEQCL

SEQ ID NO: 817 - protein, 80 aa, Artificial sequence
  Synthetic
QVCTSCEDNAEANGFCVECVEWLCKTCIRAHQRVKFTKDHTVRQKEEVSPEAVGVTSQRPVFCPFHKKEQLKLYCETCDK

SEQ ID NO: 818 - protein, 80 aa, Artificial sequence
  Synthetic
LDVSIKMEKDSGCEGAADGCVPSQVWLGASDRSHPATFPTRMHLKTEPDSRQQVYISHLGHGVRGAQPHGRATAGRSREL

SEQ ID NO: 819 - protein, 80 aa, Artificial sequence
  Synthetic
MELPAVGEHVFAVESIEKKRIRKGRVEYLVKWRGWSPKYNTWEPEENILDPRLLIAFQNRERQEQLMGYRKRGPKPKPLV

SEQ ID NO: 820 - protein, 80 aa, Artificial sequence
  Synthetic
GSLQGAFQPKTSNPIDVAARPGTVPHTLLQKDPRLTDPFRPMLRKPGKWCAMHVHIAWQIYHHQQKVKKQMQSDPHKLDF

SEQ ID NO: 821 - protein, 80 aa, Artificial sequence
  Synthetic
LKVKTEPVDFLDPFTCNVSVPIKDELLPVMSLPSSELLSKPFTNTLQLNLYNTPFQSMQSSGSAHQMITTLPLGMTCPID

SEQ ID NO: 822 - protein, 80 aa, Artificial sequence
  Synthetic
LVKEEPKEDNGLPTSFTLNAADRPANHTKLKDPSEYVANSASALFSQDISVKMASDFLMKLSAANQKEPMNLNFKVKEEP

SEQ ID NO: 823 - protein, 80 aa, Artificial sequence
  Synthetic
EPQNHFSSFKYSGNAVVESYSVLGNCRPSDPYSMNSVYSYHSYYAQPSLTSVNGFHSKYALPSFSYYGFPSSNPVFPSQF

SEQ ID NO: 824 - protein, 80 aa, Artificial sequence
  Synthetic
IPEFDPGATKYTDKDNGGMLVWSPYHSIPDAKLDEYIAIAKEKHGYNVEQALGMLFWHKHNIEKSLADLPNFTPFPDEWT

SEQ ID NO: 825 - protein, 80 aa, Artificial sequence
  Synthetic
KNPVSFHPLFEGGLCQTCRDRFLELFYMYDDDGYQSYCTVCCEGRELLLCSNTSCCRCFCVECLEVLVGTGTAAEAKLQE

SEQ ID NO: 826 - protein, 80 aa, Artificial sequence
  Synthetic
DTTKAPKGSLKDIYKVFNGEGEQIRAFKCEHCRVLFLDHVMYTIHMGCHGYRDPLECNICGYRSQDRYEFSSHIVRGEHT

SEQ ID NO: 827 - protein, 80 aa, Artificial sequence
  Synthetic
PAVRTRNNNSVSSRERHRPSPRSTRGRQGRNHVDESPVEFPATRSLRRRATASAGTPWPSPPSSYLTIDLTDDTEDTHGT

SEQ ID NO: 828 - protein, 80 aa, Artificial sequence
  Synthetic
AESYKETQMVKIKEEPMEVDIQDSHVSISPSRNVGYSTLIGREKTEPLQKMPEGRVPPERNLFSQDISVKMASELLFQLS

SEQ ID NO: 829 - protein, 80 aa, Artificial sequence
  Synthetic
NQKLQKVIQWLLEEKLCALQCAVFDKTLAELKTRVEKIECNKRHKTVLTELQAKIARLTKRFEAAKEDLKKRHEHPPNPP

SEQ ID NO: 830 - protein, 80 aa, Artificial sequence
  Synthetic
VVVKEELGGDVKVESTSPKTFLESKEELSHSPEPCTKMTMRLRRNHSNAQFIESYVCRMCSRGDEDDKLLLCDGCDDNYH

SEQ ID NO: 831 - protein, 80 aa, Artificial sequence
  Synthetic
MAENLKGCSVCCKSSWNQLQDLCRLAKLSCPALGISKRNLYDFEVEYLCDYKKIREQEYYLVKWRGYPDSESTWEPRQNL

SEQ ID NO: 832 - protein, 80 aa, Artificial sequence
  Synthetic
APCKLGSQAGEAAKVFGGFQVVPAPDGQFAFLIPNGAFAHSGPVIPVYTSNSGTSVGPNAVSPSSGPSLTADSMWRPWRN

SEQ ID NO: 833 - protein, 80 aa, Artificial sequence
  Synthetic
VKKEDSKEQPDLPSLAPPSSLPLSETSSRPAKSQEGTDSKKVLQFPSLHTTTNVSWCYLNYIKPNHIQHADRRSSVYAGW

SEQ ID NO: 834 - protein, 80 aa, Artificial sequence
  Synthetic
QLSCSVKEEPNVDGQEVAPSSPPLAAQSPEGNHGHQEPASTSFHPPRIQEEWGLLDRSQKELYWDAMLEKYGTVVSLGLP

SEQ ID NO: 835 - protein, 80 aa, Artificial sequence
  Synthetic
TSSVIRLNSPTTTSQIMARKKRRGIIEKRRRDRINNSLSELRRLVPTAFEKQGSAKLEKAEILQMTVDHLKMLQATGGKG

SEQ ID NO: 836 - protein, 80 aa, Artificial sequence
  Synthetic
TVVKTEVCSPLRDQEYGQPCSRRPDSSAMEVEPKKLKGKRDLIVPKSFQQVDFWFCESCQEYFVDECPNHGPPVFVSDTP

SEQ ID NO: 837 - protein, 80 aa, Artificial sequence
  Synthetic
EGQYVLCRWTDGLYYLGKIKRVSSSKQSCLVTFEDNSKYWVLWKDIQHAGVPGEEPKCNICLGKTSGPLNEILICGKCGL

SEQ ID NO: 838 - protein, 80 aa, Artificial sequence
  Synthetic
KVEEAEPEEFVVEKVLDRRVVNGKVEYFLKWKGFTDADNTWEPEENLDCPELIEAFLNSQKAGKEKDGTKRKSLSDSESD

SEQ ID NO: 839 - protein, 80 aa, Artificial sequence
  Synthetic
NPELPPRLGPVPSGLSQKGTQIPDHFRPPLRKPGKWCAMHVRVAYMILRHQEKMKGDSHKLDFRNDLLPCLPGPYGALPP

SEQ ID NO: 840 - protein, 80 aa, Artificial sequence
  Synthetic
FPSKVCLQLKIREVRQKIMQAATPTEQPPGAEAPLPVPPPTGTAAAPAPTPSPAGGPDPTSPSSDSGTAQAAPPLPPPPE

SEQ ID NO: 841 - protein, 80 aa, Artificial sequence
  Synthetic
EEEEEEEEEDMSHFSLRLEGGRQDSEDEEERLINLSELTPYILCSICKGYLIDATTITECLHTFCKSCIVRHFYYSNRCP

SEQ ID NO: 842 - protein, 80 aa, Artificial sequence
  Synthetic
DDKKTSNLSVLRTALRYIQSLKRKEKEYEHEMERLAREKIATQQRLAELKHELSQWMDVLEIDRVLRQTGQPEDDQASTS

SEQ ID NO: 843 - protein, 80 aa, Artificial sequence
  Synthetic
LEHVHGSGPYSAPSPAYSSSSLYAPDAVASSGPIISDITELAPASPMASPGGSIDERPLSSSPLVRVKEEPPSPPQSPRV

SEQ ID NO: 844 - protein, 80 aa, Artificial sequence
  Synthetic
ITTSTGFLTDLTLDDILFADIDTSMYDFDPCTSSSGTASKMAPVSADDLLKTLAPYSSQPVTPSQPFKMDLTELDHIMEV

SEQ ID NO: 845 - protein, 80 aa, Artificial sequence
  Synthetic
MHRTTRIKITELNPHLMCVLCGGYFIDATTIIECLHSFCKTCIVRYLETSKYCPICDVQVHKTRPLLNIRSDKTLQDIVY

SEQ ID NO: 846 - protein, 80 aa, Artificial sequence
  Synthetic
RPRLPGPLPPGEAGLPAPSTRPLLSSEVPQISPQEGLPLSQSALSIAKEKNISLQTAIAIEALTQLSSALPQPSHSTPQA

SEQ ID NO: 847 - protein, 80 aa, Artificial sequence
  Synthetic
MYDPKTRSLNYCGHIYTPISCKIRDLLPVMCDRAGFIQDTSLILYEEVKPNLTERIQDYDVSLDKALDELMDGDIIVFQK

SEQ ID NO: 848 - protein, 80 aa, Artificial sequence
  Synthetic
SQPPVFKVFPGSTTEDYNLIVIERGAAAAATGQPGTAPAGTPGAPPLAGMAIVKEEETEAAIGAPPTATEGPETKPVLMA

SEQ ID NO: 849 - protein, 80 aa, Artificial sequence
  Synthetic
TVAGIPASKVSKWSTDEVSEFIQSLPGCEEHGKVFKDEQIDGEAFLLMTQTDIVKIMSIKLGPALKIFNSILMFKAAEKN

SEQ ID NO: 850 - protein, 80 aa, Artificial sequence
  Synthetic
PQEGLLRGTPGPSKEVLRVVGESGEPVKAFKCEHCRILFLDHVMFTIHMGCHGFRDPFECNICGYHSQDRYEFSSHIVRG

SEQ ID NO: 851 - protein, 80 aa, Artificial sequence
  Synthetic
CGSGNDEDRLLLCDGCDDSYHTFCLIPPLHDVPKGDWRCPKCLAQECSKPQEAFGFEQAARDYTLRTFGEMADAFKSDYF

SEQ ID NO: 852 - protein, 80 aa, Artificial sequence
  Synthetic
QVVMPPLVRGAQQIHSIRQHSSTGPPPLLLAPRASVPSVQIQGQRIIQQGLIRVANVPNTSLLVNIPQPTPASLKGTTAT

SEQ ID NO: 853 - protein, 80 aa, Artificial sequence
  Synthetic
QERIQRLEEDRQSLDLSSEWWDDKLHARGSSRSWDSLPPSKRKKAPLVSGPYIVYMLQEIDILEDWTAIKKARAAVSPQK

SEQ ID NO: 854 - protein, 80 aa, Artificial sequence
  Synthetic
PLSKPRTPRRSKSDGEAKPEPSPSPRITRKSTRQTTITSHFAKGPAKRKPQEESERAKSDESIKEEDKDQDEKRRRVTSR

SEQ ID NO: 855 - protein, 80 aa, Artificial sequence
  Synthetic
MGHMHLHSDSKPFKCLYCPSKFTLKGNLTRHMKVKHGVMERGLHSQGLGRGRIALAQTAGVLRSLEQEEPFDLSQKRRAK

SEQ ID NO: 856 - protein, 80 aa, Artificial sequence
  Synthetic
GELQLYRVLQRANLLSYYETFIQQGGDDVQQLCEAGEEEFLEIMALVGMATKPLHVRRLQKALREWATNPGLFSQPVPAV

SEQ ID NO: 857 - protein, 80 aa, Artificial sequence
  Synthetic
QLQEKHVKDEQIEHWKKIVKTQEELKELLNKMVNLKEKIKELHQQYKEASEVKPPRDITAEFLVKSKHRDLTALCKEYDE

SEQ ID NO: 858 - protein, 80 aa, Artificial sequence
  Synthetic
LQSKKDTETENPPVENTLSPKLEITEKWEKYWNEYGGGLLWQSWQEKHPGQALSSEPWNFPDTKEEWEQHYSQLYWYYLE

SEQ ID NO: 859 - protein, 80 aa, Artificial sequence
  Synthetic
VSKEPGQLEDEEEEPSSFKADSPAEASLASDPHELPTTSFCPNCIRLKKKVRELQAELDMLKSGKLPEPPVLPPQVLELP

SEQ ID NO: 860 - protein, 80 aa, Artificial sequence
  Synthetic
PGEENLLGEAAGGQDMADSMLMQGSRGLTDQAIFYAVTPLPWCPHLVAVCPIPAAGLDVTQPCGDCGTIQENWVCLSCYQ

SEQ ID NO: 861 - protein, 80 aa, Artificial sequence
  Synthetic
MGKKQNKKKVEEVLEEEEEEYVVEKVLDRRVVKGKVEYLLKWKGFSDEDNTWEPEENLDCPDLIAEFLQSQKTAHETDKS

SEQ ID NO: 862 - protein, 80 aa, Artificial sequence
  Synthetic
VEEKVNQLKEEVRLQYEKLHQLLDEDLRQTVEVLDKAQAKFCSENAAQALHLGERMQEAKKLLGSLQLLFDKTEDVSFMK

SEQ ID NO: 863 - protein, 80 aa, Artificial sequence
  Synthetic
QTHPSLASQGSKKSKSSSKSTTSQIPLQAQEDCCVHCILSCLFCEFLTLCNIVLDCATCGSCSSEDSCLCCCCCGSGECA

SEQ ID NO: 864 - protein, 80 aa, Artificial sequence
  Synthetic
HRGSTAGEVYRSHLPTHLDPAMPFHRALDPAAAAYLFQRQLSPTPGYPSQYQLYAMENTRQTILNDYITSQQMQVNLRPD

SEQ ID NO: 865 - protein, 80 aa, Artificial sequence
  Synthetic
KKERKPQKPGKYICQYCSRPCAKPSVLQKHIRSHTGERPYPCGPCGFSFKTKSNLYKHRKSHAHRIKAGLASGMGGEMYP

SEQ ID NO: 866 - protein, 80 aa, Artificial sequence
  Synthetic
AASENSQDALRVVSTSGEQMKVYKCEHCRVLFLDHVMYTIHMGCHGFRDPFECNMCGYHSQDRYEFSSHITRGEHRFHMS

SEQ ID NO: 867 - protein, 80 aa, Artificial sequence
  Synthetic
TSSQYRQLLSDYGPPSLGYTQGTGNSQVPQSKYAELLAIIEELGKEIRPTYAGSKSAMERLKRGIIHARGLVRECLAETE

SEQ ID NO: 868 - protein, 80 aa, Artificial sequence
  Synthetic
SEGESEEVEVTDISDEDEEDGEVFKTPRAPPAPPKPEPGEAPGASQCMPLKLRFKRRWSEDCRLEGGGGPAGGFEDEGED

SEQ ID NO: 869 - protein, 80 aa, Artificial sequence
  Synthetic
IPKGVWRCPKCVMAECKRPPEAFGFEQATREYTLQSFGEMADSFKADYFNMPVHMVPTELVEKEFWRLVNSIEEDVTVEY

SEQ ID NO: 870 - protein, 80 aa, Artificial sequence
  Synthetic
LLGWITAHVLKQEVLPAAQKTEEPLGSPHPSGTVESPGEGPQDTRIEGSVQLSCSVKEEPNVDGQEVAPSSPPLAAQSPE

SEQ ID NO: 871 - protein, 80 aa, Artificial sequence
  Synthetic
DPRELRERHRPLVVPGSRQEEVIDHKLTEREWAEEWKHLNNLLNCIMDMVEKTRRSLTVLRRCQEADREELNHWARRYSD

SEQ ID NO: 872 - protein, 80 aa, Artificial sequence
  Synthetic
SDRREDYYDIQLSIKGKKNIFESFVDYVAVEQLDGDNKYDAGEHGLQEAEKGVKFLTLPPVLHLQLMRFMYDPQTDQNIK

SEQ ID NO: 873 - protein, 80 aa, Artificial sequence
  Synthetic
EIAELQQAVVEELGISMEELRHFIDEELEKMDCVQQRKKQLAELETWVIQKESEVAHVDQLFDDASRAVTNCESLVKDFY

SEQ ID NO: 874 - protein, 80 aa, Artificial sequence
  Synthetic
FPTDIPKSAPHSMTASSSSVSSPSPGLPRRSAPPSPLCRSLSPGTGGGVRGGVGYLSRGDPVRVLARRVRPDGSVQYLVE

SEQ ID NO: 875 - protein, 80 aa, Artificial sequence
  Synthetic
LKPPPICPRDSVKVINKEGEVMDVYRCDHCRVLFLDYVMFTIHMGCHGFRDPFECNMCGYRSHDRYEFSSHIARGEHRAL

SEQ ID NO: 876 - protein, 80 aa, Artificial sequence
  Synthetic
EHQALLDEPYLDRLPGQKEAHAQAGVQVKQEPIESDEEEAEPPREVEPGQRQPSEQELLFRQQALLLEQQRIHQLRNYQA

SEQ ID NO: 877 - protein, 80 aa, Artificial sequence
  Synthetic
AEPSMDVILVGSSELSSSVSPGTGRDLIAYEVKANQRNIEDICICCGSLQVHTQHPLFEGGICAPCKDKFLDALFLYDDD

SEQ ID NO: 878 - protein, 80 aa, Artificial sequence
  Synthetic
SSACVDDTLGQVGAVKVKEEPVDSDEDAQIQEMESGEQAAFMQQPFLEPTHTRALSVRQAPLAAVGMDGLEKHRLVSRTH

SEQ ID NO: 879 - protein, 80 aa, Artificial sequence
  Synthetic
VKVEEEEEASLSQGGESSHDHIAHSEAARLRFRHFRYEEASGPHEALAHLRALCCQWLQPEAHSKEQILELLVLEQFLGA

SEQ ID NO: 880 - protein, 80 aa, Artificial sequence
  Synthetic
QDIHSIQAFHEQIVIAVKAPAETRLDVPAPREDSITVHIRSTNGPIDVYLCEVEQGQTSNKRSEGVGTSSSESTHPEGPE

SEQ ID NO: 881 - protein, 80 aa, Artificial sequence
  Synthetic
AAQNCQRPCKDKVDWVQCDGGCDEWFHQVCVGVSPEMAENEDYICINCAKKQGPVSPGPAPPPSFIMSYKLPMEDLKETS

SEQ ID NO: 882 - protein, 80 aa, Artificial sequence
  Synthetic
KEGKIVDAKAIFTGHSAVVEDVAWHLLHESLFGSVADDQKLMIWDTRSNTTSKPSHLVDAHTAEVNCLSFNPYSEFILAT

SEQ ID NO: 883 - protein, 80 aa, Artificial sequence
  Synthetic
EREREKLREVIEIEDASPTKCPITTKLVLDEDEETKEPLVQVHRNMVIKLKPHQVDGVQFMWDCCCESVKKTKKSPGSGC

SEQ ID NO: 884 - protein, 80 aa, Artificial sequence
  Synthetic
EPETARLRFRGFCYQEVAGPREALARLRELCCQWLQPEAHSKEQMLEMLVLEQFLGTLPPEIQAWVRGQRPGSPEEAAAL

SEQ ID NO: 885 - protein, 80 aa, Artificial sequence
  Synthetic
PVVQNAASIVQPSPAHVGQQGLSKLPSRPGAQGVEPQNLRTLQGHSVIRSATNTTLPHMLMSQRVIAPNPAQLQGQRGPP

SEQ ID NO: 886 - protein, 80 aa, Artificial sequence
  Synthetic
TESCHSQMHRPIKVEPGCKPHACMHTAPPENKTWKKVTKQENPPASCDNVQQKSIIETMEQHLKQFHAKSLFDHKALTLK

SEQ ID NO: 887 - protein, 80 aa, Artificial sequence
  Synthetic
VVPKEEKEEETAAAPPVEEGEEQKPPAAEELAVDTGKAEEPVKSECTEEAEEGPAKGKDAEAAEATAEGALKAEKKEGGS

SEQ ID NO: 888 - protein, 80 aa, Artificial sequence
  Synthetic
PPMKSLSSTSAGGKKQAQPSCAPASRPPAKQQKIKENQKTDVLCADEEEDCQAASLLQKYTDNSEKPSGKRLCKTKHLIP

SEQ ID NO: 889 - protein, 80 aa, Artificial sequence
  Synthetic
TSRDSSPVMRSSSTLPVPQPSSAPPTPTRLTGANSDMEEEERGDLIQFYNNIYIKQIKTFAMKYSQANMDAPPLSPYPFV

SEQ ID NO: 890 - protein, 80 aa, Artificial sequence
  Synthetic
IPRGIWRCPKCILAECKQPPEAFGFEQATQEYSLQSFGEMADSFKSDYFNMPVHMVPTELVEKEFWRLVSSIEEDVTVEY

SEQ ID NO: 891 - protein, 80 aa, Artificial sequence
  Synthetic
STQHLVALPGGAQPVHSSPVFPPSQYPNGSAAQQPMLPQYGGRKILVCSVDNCYCSSVANHGGHQPYPRSGHFPWTVPSQ

SEQ ID NO: 892 - protein, 80 aa, Artificial sequence
  Synthetic
ILPVIQPVVVQPVPFMYTSHLQQPLMVSLSEEMENSSSSMQVPVIESYEKPISQKKIKIEPGIEPQRTDYYPEEMSPPLM

SEQ ID NO: 893 - protein, 80 aa, Artificial sequence
  Synthetic
YGGLKTPTQLEGATRGTTEPHSRGHLSRPEAQSLSPYTTSANRAKLLAKNRQTFLLQTTKLTRLARRMCRDLLQPRRAAR

SEQ ID NO: 894 - protein, 80 aa, Artificial sequence
  Synthetic
MAQPPRLSRSGASSLWDPASPAPTSGPRPRLWEGQDVLARWTDGLLYLGTIKKVDSAREVCLVQFEDDSQFLVLWKDISP

SEQ ID NO: 895 - protein, 80 aa, Artificial sequence
  Synthetic
AKLARRSQERDNLGMLVWSPNQNLSEAKLDEYIAIAKEKHGYNMEQALGMLFWHKHNIEKSLADLPNFTPFPDEWTVEDK

SEQ ID NO: 896 - protein, 80 aa, Artificial sequence; identical to SEQ ID NO: 766
  Synthetic

SEQ ID NO: 897 - DNA, 240 bp, Artificial sequence
  Synthetic
aagatgaagaagttccagatccccgtgagcttccaggacctgaccgtgaacttcacccaggaggagtggcagcagctggaccccgcccagagactgctgtacagagatgtgatgctggagaactacagcaacctggtgagcgtgggctaccacgtgagcaagcccgacgtgatcttcaagctggagcagggcgaggagccctggatcgtggaggagttcagcaaccagaactaccccgac

SEQ ID NO: 898 - DNA, 240 bp, Artificial sequence
  Synthetic
tgcagccaggagagcgccctgagcgaggaggaggaggacaccaccagacccctggagaccgtgaccttcaaggacgtggccgtggacctgacccaggaggagtgggagcagatgaagcccgcccagagaaacctgtacagagatgtgatgctggagaactacagcaacctggtgaccgtgggctgccaggtgaccaagcccgacgtgatcttcaagctggagcaggaggaggagccctgg

SEQ ID NO: 899 - DNA, 240 bp, Artificial sequence
  Synthetic
atcaccagccagggcagcgtgagcttcagagatgtgaccgtgggcttcacccaggaggagtggcagcacctggaccccgcccagagaaccctgtacagagatgtgatgctggagaactacagccacctggtgagcgtgggctactgcatccccaagcccgaggtgatcctgaagctggagaagggcgaggagccctggatcctggaggagaagttccccagccagagccacctggagctg

SEQ ID NO: 900 - DNA, 240 bp, Artificial sequence
  Synthetic
ccccaggtgaccttcaacgacgtggccatcgacttcacccacgaggagtggggctggctgagcagcgcccagagagacctgtacaaggacgtgatggtgcagaactacgagaacctggtgagcgtggccggcctgagcgtgaccaagccctacgtgatcaccctgctggaggacggcaaggagccctggatgatggagaagaagctgagcaagggcatgatccccgactgggagagcaga

SEQ ID NO: 901 - DNA, 240 bp, Artificial sequence
  Synthetic
cccctgagattcagcaccctgttccaggagcagcagaagatgaacatcagccaggccagcgtgagcttcaaggacgtgaccatcgagttcacccaggaggagtggcagcagatggcccccgtgcagaagaacctgtacagagatgtgatgctggagaactacagcaacctggtgagcgtgggctactgctgcttcaagcccgaggtgatcttcaagctggagcagggcgaggagccctgg

SEQ ID NO: 902 - DNA, 240 bp, Artificial sequence
  Synthetic
caggaccccagcgccgagggcctgagcgaggaggtgcccgtggtgttcgaggagctgcccgtggtgttcgaggacgtggccgtgtacttcaccagagaggagtggggcatgctggacaagagacagaaggagctgtacagagatgtgatgagaatgaactacgagctgctggccagcctgggccccgccgccgccaagcctgacctgatcagcaagctggagagaagagccgccccctgg

SEQ ID NO: 903 - DNA, 240 bp, Artificial sequence
  Synthetic
agccagggcagcgtgaccttcagagatgtggccatcgacttcagccaggaggagtggaagtggctgcagcccgcccagagagacctgtacagatgcgtgatgctggagaactacggccacctggtgagcctgggcctgagcatcagcaagcccgacgtggtgagcctgctggagcagggcaaggagccctggctgggcaagagagaggtgaagagagacctgttcagcgtgagcgagagc

SEQ ID NO: 904 - DNA, 240 bp, Artificial sequence
  Synthetic
ggcagcctgaccttcagagatgtggccatcgagttcagcctggaggagtggcagtgcctggacaccgcccagcagaacctgtacagaaacgtgatgctggagaactacagaaacctggtgttcctgggcatcgccgccttcaagcccgacctgatcatcttcctggaggagggcaaggagagctggaacatgaagagacacgagatggtggaggagagccccgtgatctgcagccacttc

SEQ ID NO: 905 - DNA, 240 bp, Artificial sequence
  Synthetic
aacaagagccaggagcaggtgagcttcaaggacgtgtgcgtggacttcacccaggaggagtggtacctgctggaccccgcccagaagatcctgtacagagatgtgatcctggagaactacagcaacctggtgagcgtgggctactgcatcaccaagcccgaggtgatcttcaagatcgagcagggcgaggagccctggatcctggagaagggcttccccagccagtgccaccccgagaga

SEQ ID NO: 906 - DNA, 240 bp, Artificial sequence
  Synthetic
ccccacctgctggtgaccttcagagatgtggccatcgacttcagccaggaggagtgggagtgcctggaccccgcccagagagacctgtacagagatgtgatgctggagaactacagcaacctgatcagcctggacctggagagcagctgcgtgaccaagaagctgagccccgagaaggagatctacgagatggagagcctgcagtgggagaacatgggcaagagaatcaaccaccacctg

SEQ ID NO: 907 - DNA, 240 bp, Artificial sequence
  Synthetic
gaggaggagagaaagaccgccgagctgcagaagaacagaatccaggacagcgtggtgttcgaggacgtggccgtggacttcacccaggaggagtgggccctgctggacctggcccagagaaacctgtacagagatgtgatgctggagaacttccagaacctggccagcctgggctaccccctgcacaccccccacctgatcagccagtgggagcaggaggaggacctgcagaccgtgaag

SEQ ID NO: 908 - DNA, 240 bp, Artificial sequence
  Synthetic
ggcctgctgaccttcagagatgtggccatcgagttcagcctggaggagtggcagtgcctggacaccgcccagaagaacctgtacagaaacgtgatgctggagaactacagaaacctggccttcctgggcatcgccgtgagcaagcccgacctgatcatctgcctggagaaggagaaggagccctggaacatgaagagagatgagatggtggacgagccccccggcatctgcccccacttc

SEQ ID NO: 909 - DNA, 240 bp, Artificial sequence
  Synthetic
agagcccccacccaggtgaccgtgagccccgagacccacatggacctgaccaagggctgcgtgaccttcgaggacatcgccatctacttcagccaggacgagtggggcctgctggacgaggcccagagactgctgtacctggaggtgatgctggagaacttcgccctggtggccagcctgggctgcggccacggcaccgaggacgaagagacccctagcgaccagaacgtgagcgtgggc

SEQ ID NO: 910 - DNA, 240 bp, Artificial sequence
  Synthetic
gccgccgtgagccccaccaccagatgccaggagagcgtgaccttcgaggacgtggccgtggtgttcaccgacgaggagtggagcagactggtgcccatccagagagacctgtacaaggaggtgatgctggagaactacaacagcatcgtgagcctgggcctgcccgtgccccagcccgacgtgatcttccagctgaagagaggcgacaagccctggatggtggacctgcacggcagcgag

SEQ ID NO: 911 - DNA, 240 bp, Artificial sequence
  Synthetic
cacagcctggagaaggtgaccttcgaggacgtggccatcgacttcacccaggaggagtgggacatgatggacaccagcaagagaaagctgtacagagatgtgatgctggagaacatcagccacctggtgagcctgggctaccagatcagcaagagctacatcatcctgcagctggagcagggcaaggagctgtggagagagggcagagtgttcctgcaggaccagaaccccgacagagag

SEQ ID NO: 912 - DNA, 240 bp, Artificial sequence
  Synthetic
gacagcgtgagcttcgaggacgtggccgtgaacttcaccctggaggagtgggccctgctggacagcagccagaagaagctgtacgaggacgtgatgcaggagaccttcaagaacctggtgtgcctgggcaagaagtgggaggaccaggacatcgaggacgaccacagaaaccagggcaagaacagaagatgccacatggtggagagactgtgcgagagcagaagaggcagcaagtgcggc

SEQ ID NO: 913 - DNA, 240 bp, Artificial sequence
  Synthetic
aacgtggaggtggtgaaggtgatgccccaggacctggtgaccttcaaggacgtggccatcgacttcagccaggaggagtggcagtggatgaaccccgcccagaagagactgtacagaagcatgatgctggagaactaccagagcctggtgagcctgggcctgtgcatcagcaagccctacgtgatcagcctgctggagcagggcagagagccctgggagatgaccagcgagatgaccaga

SEQ ID NO: 914 - DNA, 240 bp, Artificial sequence
  Synthetic
acccagcccgacgaggacctgcacctgcaggccgaggagacccagctggtgaaggagagcgtgaccttcaaggacgtggccatcgacttcaccctggaggagtggagactgatggaccccacccagagaaacctgcacaaggacgtgatgctggagaactacagaaacctggtgagcctgggcctggccgtgagcaagcccgacatgatcagccacctggagaacggcaagggcccctgg

SEQ ID NO: 915 - DNA, 240 bp, Artificial sequence
  Synthetic
accatgctgcaggagagcttcagcttcgacgacctgagcgtggacttcacccagaaggagtggcagctgctggaccccagccagaagaacctgtacaaggacgtgatgctggagaactacagcagcctggtgagcctgggctacgaggtgatgaagcccgacgtgatcttcaagctggagcagggcgaggagccctgggtgggcgacggcgagatccctagcagcgacagccccgaggtg

SEQ ID NO: 916 - DNA, 240 bp, Artificial sequence
  Synthetic
gaggtggtgaccttcggcgacgtggccgtgcacttcagcagagaggagtggcagtgcctggaccccggccagagagccctgtacagagaggtgatgctggagaaccacagcagcgtggccggcctggccggcttcctggtgttcaagcccgagctgatcagcagactggagcagggcgaggagccctgggtgctggacctgcagggcgccgaaggcacagaggcccccagaaccagcaag

SEQ ID NO: 917 - DNA, 240 bp, Artificial sequence
  Synthetic
agaaacgccgaggaggagagaatgatcgccgtgttcctgaccacctggctgcaggagcccatgaccttcaaggacgtggccgtggagttcacccaggaggagtggatgatgctggacagcgcccagagaagcctgtacagagatgtgatgctggagaactacagaaacctgaccagcgtggagtaccagctgtacagactgaccgtgatcagccccctggaccaggaggagatcagaaac

SEQ ID NO: 918 - DNA, 240 bp, Artificial sequence
  Synthetic
ggcccccagggcgccagaagacaggccttcctggccttcggcgacgtgaccgtggacttcacccagaaggagtggagactgctgagccccgcccagagagccctgtacagagaggtgaccctggagaactacagccacctggtgagcctgggcatcctgcacagcaagcccgagctgatcagaagactggagcagggcgaggtgccctggggcgaggagagaagaagaagacccggcccc

SEQ ID NO: 919 - DNA, 240 bp, Artificial sequence
  Synthetic
cacagcctgaagaagctgaccttcgaggacgtggccatcgacttcacccaggaggagtgggccatgatggacaccagcaagagaaagctgtacagagatgtgatgctggagaacatcagccacctggtgagcctgggctaccagatcagcaagagctacatcatcctgcagctggagcagggcaaggagctgtggagagagggcagagtgttcctgcaggaccagaaccccaacagagag

SEQ ID NO: 920 - DNA, 240 bp, Artificial sequence
  Synthetic
atgcccgaggtggagttccccgaccagttcttcaccgtgctgaccatggaccacgagctggtgaccctgagagatgtggtgatcaacttcagccaggaggagtgggagtacctggacagcgcccagagaaacctgtactgggacgtgatgatggagaactacagcaacctgctgagcctggacctggagagcagaaacgagaccaagcacctgagcgtgggcaaggacatcatccagaac

SEQ ID NO: 921 - DNA, 240 bp, Artificial sequence
  Synthetic
cccggcgcccccggcagcctggagatgggccccctgaccttcagagatgtgaccatcgagttcagcctggaggagtggcagtgcctggacaccgtgcagcagaacctgtacagagatgtgatgctggagaactacagaaacctggtgttcctgggcatggccgtgttcaagcccgacctgatcacctgcctgaagcagggcaaggagccctggaacatgaagagacacgagatggtgacc

SEQ ID NO: 922 - DNA, 240 bp, Artificial sequence
  Synthetic
agagaccccgcccaggtgcccgtggccgccgacctgctgaccgaccacgaagaaggctacgtgaccttcgaggacgtggccgtgtacttcagccaggaggagtggagactgctggacgacgcccagagactgctgtacagaaacgtgatgctggagaacttcaccctgctggccagcctgggcctggccagcagcaagacccacgagatcacccagctggagagctgggaggagcccttc

SEQ ID NO: 923 - DNA, 240 bp, Artificial sequence
  Synthetic
cacagcctgaagaaggtgaccttcgaggacgtggccatcgacttcacccaggaggagtgggccatgatggacaccagcaagagaaagctgtacagagatgtgatgctggagaacatcagccacctggtgagcctgggctaccagatcagcaagagctacatcatcctgcagctggagcagggcaaggagctgtggagagagggcagagagttcctgcaggaccagaaccccgacagagag

SEQ ID NO: 924 - DNA, 240 bp, Artificial sequence
  Synthetic
accaagagcaaggaggccgtgaccttcaaggacgtggccgtggtgttcagcgaggaggagctgcagctgctggacctggcccagagaaagctgtacagagatgtgatgctggagaacttcagaaacgtggtgagcgtgggccaccagagcacccccgacggcctgccccagcttgagagagaggagaagctgtggatgatgaagatggccacccagagagacaacagcagcggcgccaag

SEQ ID NO: 925 - DNA, 240 bp, Artificial sequence
  Synthetic
agccaggtgaccttcagcgacgtggccatcgacttcagccacgaggagtgggcctgcctggacagcgcccagagagacctgtacaaggacgtgatggtgcagaactacgagaacctggtgagcgtgggcctgagcgtgaccaagccctacgtgatcatgctgctggaggacggcaaggagccctggatgatggagaagaagctgagcaaggcctaccccttccccctgagccacagcgtg

SEQ ID NO: 926 - DNA, 240 bp, Artificial sequence
  Synthetic
cccggccccctgagaagcctggagatggagagcctgcagttcagagatgtggccgtggagttcagcctggaggagtggcactgcctggacaccgcccagcagaacctgtacagagatgtgatgctggagaactacagacacctggtgttcctgggcatcatcgtgagcaagcccgacctgatcacctgcctggagcagggcatcaagcccctgaccatgaagagacacgagatgatcgcc

SEQ ID NO: 927 - DNA, 240 bp, Artificial sequence
  Synthetic
ctgcagaccacctggccccaggagagcgtgaccttcgaggacgtggccgtgtacttcacccagaaccagtgggccagcctggaccccgcccagagagccctgtacggcgaggtgatgctggagaactacgccaacgtggccagcctggtggccttccccttccccaagcccgccctgatcagccacctggagagaggcgaggccccctggggacctgacccctgggacaccgagatcctg

SEQ ID NO: 928 - DNA, 240 bp, Artificial sequence
  Synthetic
gcccccctgctggcccccagacccggcgagaccagacccggctgcagaaagcccggcacagtgagcttcgccgacgtggccgtgtacttcagccccgaggagtggggctgcctgagacccgcccagagagccctgtacagagatgtgatgcaggagacctacggccacctgggcgccctgggcttccccggccccaaacctgctctgatcagctggatggagcaggagagcgaggcctgg

SEQ ID NO: 929 - DNA, 240 bp, Artificial sequence
  Synthetic
aacaaggtggagcagaagagccaggagagcgtgagcttcaaggacgtgaccgtgggcttcacccaggaggagtggcagcacctggaccccagccagagagccctgtacagagatgtgatgctggagaactacagcaacctggtgagcgtgggctactgcgtgcacaagcccgaggtgatcttcagactgcagcagggcgaggagccctggaagcaggaggaggagttccccagccagagc

SEQ ID NO: 930 - DNA, 240 bp, Artificial sequence
  Synthetic
tgcttcagccaggaggagagaatggccgccggctacctgcccagatggagccaggagctggtgaccttcgaggacgtgagcatggacttcagccaggaggagtgggagctgctggagcccgcccagaagaacctgtacagagaggtgatgctggagaactacagaaacgtggtgagcctggaggccctgaagaaccagtgcaccgacgtgggcatcaaggagggccccctgagccccgcc

SEQ ID NO: 931 - DNA, 240 bp, Artificial sequence
  Synthetic
gacagcgtggccttcgaggacgtggccgtgaacttcacccaggaggagtgggccctgctggaccccagccagaagaacctgtacagagaggtgatgcaggagaccctgagaaacctgaccagcatcggcaagaagtggaacaaccagtacatcgaggacgagcaccagaaccccagaagaaacctgagaagactgatcggcgagagactgagcgagagcaaggagagccaccagcacggc

SEQ ID NO: 932 - DNA, 240 bp, Artificial sequence
  Synthetic
atgggccccgcccaggtgcccatgaacagcgaggtgatcgtggaccccatccagggccaggtgaacttcgaggacgtgttcgtgtacttcagccaggaggagtgggtgctgctggacgaggcccagagactgctgtacagagatgtgatgctggagaacttcgccctgatggccagcctgggccacaccagcttcatgagccacatcgtggccagcctggtgatgggcagcgagccctgg

SEQ ID NO: 933 - DNA, 240 bp, Artificial sequence
  Synthetic
accaccttcaaggaggccatgaccttcaaggacgtggccgtggtgttcaccgaggaggagctgggcctgctggacctggcccagagaaagctgtacagagatgtgatgctggagaacttcagaaacctgctgagcgtgggccaccaggccttccacagagacaccttccacttcctgagagaggagaagatctggatgatgaagaccgccatccagagagagggcaacagcggcgacaag

SEQ ID NO: 934 - DNA, 240 bp, Artificial sequence
  Synthetic
gacagcaccctgctgcagggcggccacaacctgctgagcagcgccagcttccaggaggccgtgaccttcaaggacgtgatcgtggacttcacccaggaggagtggaagcagctggaccccggccagagagacctgttcagagatgtgaccctggagaactacacccacctggtgagcatcggcctgcaggtgagcaagcccgacgtgatcagccagctggagcagggcaccgagccctgg

SEQ ID NO: 935 - DNA, 240 bp, Artificial sequence
  Synthetic
gaggccagaagcatgctggtgcccccccaggccagcgtgtgcttcgaggacgtggccatggccttcacccaggaggagtgggagcagctggacctggcccagagaaccctgtacagagaggtgaccctggagacctgggagcacatcgtgagcctgggcctgttcctgagcaagagcgacgtgatcagccagctggagcaggaggaggacctgtgcagagccgagcaggaggcccccaga

SEQ ID NO: 936 - DNA, 240 bp, Artificial sequence
  Synthetic
gacagcgtggtgttcgaggacgtggccgtggacttcaccctggaggagtgggccctgctggacagcgcccagagagacctgtacagagatgtgatgctggagaccttcagaaacctggccagcgtggacgacggcacccagttcaaggccaacggcagcgtgagcctgcaggacatgtacggccaggagaagagcaaggagcagaccatccccaacttcaccggcaacaacagctgcgcc

SEQ ID NO: 937 - DNA, 240 bp, Artificial sequence
  Synthetic
gaggagagccacggcgccctgatcagcagctgcaacagcagaaccatgaccgacggcctggtgaccttcagagatgtggccatcgacttcagccaggaggagtgggagtgcctggaccccgcccagagagacctgtacgtggacgtgatgctggagaactacagcaacctggtgagcctggacctggagagcaagacctacgagaccaagaagatcttcagcgagaacgacatcttcgag

SEQ ID NO: 938 - DNA, 240 bp, Artificial sequence
  Synthetic
gtgatcaccccccagatccccatggtgaccgaggagttcgtgaagcccagccagggccacgtgaccttcgaggacatcgccgtgtacttcagccaggaggagtggggcctgctggacgaggcccagagatgcctgtaccacgacgtgatgctggagaacttcagcctgatggccagcgtgggctgcctgcacggcatcgaggccgaggaggctcctagcgagcagaccctgagcgcccag

SEQ ID NO: 939 - DNA, 240 bp, Artificial sequence
  Synthetic
gtgcagctgagaccccagaccagaatggccaccgccctgagagaccccgccagcggcagcgtgaccttcgaggacgtggccgtgtacttcagctgggaggagtgggacctgctggacgaggcccagaagcacctgtacttcgacgtgatgctggagaacttcgccctgaccagcagcctgggctgctggtgcggcgtggagcacgaggagacccccagcgagcagagaatcagcggcgag

SEQ ID NO: 940 - DNA, 240 bp, Artificial sequence
  Synthetic
ggccccctgcagttcagagatgtggccatcgagttcagcctggaggagtggcactgcctggacgccgcccagagaaacctgtacagagatgtgatgctggagaactacagaaacctgatcttcctgggcatcgtggtgagcaagcccaacctgatcacctgcctggagcagggcaagaagcccctgaccatgaagagacacgagatgatcgccaagccccccgtgatgtacagccacttc

SEQ ID NO: 941 - DNA, 240 bp, Artificial sequence
  Synthetic
atgcaggcccaggagagcctgaccctggaggacgtggccgtggacttcacctgggaggagtggcagttcctgagccccgcccagaaggacctgtacagagatgtgatgctggagaactacagcaacctggtggccgtgggctaccaggccagcaagcccgacgccctgagcaagctggagagaggcgaggagacctgcaccaccgaggacgagatctacagcagaatctgcagcgagatc

SEQ ID NO: 942 - DNA, 240 bp, Artificial sequence
  Synthetic
ggccccctgcagttcagagatgtggccatcgagttcagcctggaggagtggcactgcctggacaccgcccagagaaacctgtacagagatgtgatgctggagaactacagaaacctggtgttcctgggcatcgtggtgagcaagcccgacctggtgacctgcctggagcagggcaagaagcccctgaccatggagagacacgagatgatcgccaagccccccgtgatgagcagccacttc

SEQ ID NO: 943 - DNA, 240 bp, Artificial sequence
  Synthetic
aacatgttcaaggaggccgtgaccttcaaggacgtggccgtggccttcaccgaggaggagctgggcctgctgggccctgctcagagaaagctgtacagagatgtgatggtggagaacttcagaaacctgctgagcgtgggccacccccccttcaagcaggacgtgagccccatcgagagaaacgagcagctgtggatcatgaccaccgccaccagaagacagggcaacctgggcgagaag

SEQ ID NO: 944 - DNA, 240 bp, Artificial sequence
  Synthetic
ggcgccctgaccttcagagatgtggccatcgagttcagcctggaggagtggcagtgcctggacaccgagcagcagaacctgtacagaaacgtgatgctggacaactacagaaacctggtgttcctgggcatcgccgtgagcaagcccgacctgatcacctgcctggagcaggagaaggagccctggaacctgaagacccacgacatggtggccaagccccccgtgatctgcagccacatc

SEQ ID NO: 945 - DNA, 240 bp, Artificial sequence
  Synthetic
agcccccagaagagcagcgccctggcccccgaggaccacggcagcagctacgagggaagcgtgagcttcagagatgtggccatcgacttcagcagagaggagtggagacacctggaccccagccagagaaacctgtacagagatgtgatgctggagacctacagccacctgctgagcgtgggctaccaggtgcccgaggccgaggtggtgatgctggagcagggcaaggagccctgggcc

SEQ ID NO: 946 - DNA, 240 bp, Artificial sequence
  Synthetic
gagctgctgaccttcagagatgtggccatcgagttcagccccgaggagtggaagtgcctggaccccgcccagcagaacctgtacagagatgtgatgctggagaactacagaaacctgatcagcctgggcgtggccatcagcaaccccgacctggtgatctacctggagcagagaaaggagccctacaaggtgaagatccacgagaccgtggccaagcaccccgccgtgtgcagccacttc

SEQ ID NO: 947 - DNA, 240 bp, Artificial sequence
  Synthetic
gagcccctgaagttcagagatgtggccatcgagttcagcctggaggagtggcagtgcctggacaccatccagcagaacctgtacagaaacgtgatgctggagaactacagaaacctggtgttcctgggcatcgtggtgagcaagcccgacctgatcacctgcctggagcaggagaaggagccctggaccagaaagagacacagaatggtggccgagccccccgtgatctgcagccacttc

SEQ ID NO: 948 - DNA, 240 bp, Artificial sequence
  Synthetic
cccagcgccagaggcaagagcaagagcaaggcccccatcaccttcggcgacctggccatctacttcagccaggaggagtgggagtggctgagccccatccagaaggacctgtacgaggacgtgatgctggagaactacagaaacctggtgagcctgggcctgagcttcagaagacccaacgtgatcaccctgctggagaagggcaaggccccctggatggtggagcccgtgagaagaaga

SEQ ID NO: 949 - DNA, 240 bp, Artificial sequence
  Synthetic
accaaggcccaggagagcctgaccctggaggacgtggccgtggacttcacctgggaggagtggcagttcctgagccccgcccagaaggacctgtacagagatgtgatgctggagaactacagcaacctggtgagcgtgggctaccaggccggcaagcccgacgccctgaccaagctggagcagggcgagcctctgtggaccctggaggacgagatccacagccccgcccaccccgagatc

SEQ ID NO: 950 - DNA, 240 bp, Artificial sequence
  Synthetic
agccaggaggaggtggaggtggccggcatcaagctgtgcaaggccatgagcctgggcagcgtgaccttcaccgacgtggccatcgacttcagccaggacgagtgggagtggctgaacctggcccagagaagcctgtacaagaaggtgatgctggagaactacagaaacctggtgagcgtgggcctgtgcatcagcaagcccgacgtgatcagcctgctggagcaggagaaggacccctgg

SEQ ID NO: 951 - DNA, 240 bp, Artificial sequence
  Synthetic
accaagagcctggagagcgtgagcttcaaggacgtgaccgtggacttcagcagagatgagtggcagcagctggacctggcccagaagagcctgtacagagaggtgatgctggagaactacttcaacctgatcagcgtgggctgccaggtgcccaagcccgaggtgatcttcagcctggagcaggaggagccctgcatgctggacggcgagatccccagccagagcagacccgacggcgac

SEQ ID NO: 952 - DNA, 240 bp, Artificial sequence
  Synthetic
agcggctgccccggcgccgagagaaacctgctggtgtacagctacttcgagaaggagaccctgaccttcagagatgtggccatcgagttcagcctggaggagtgggagtgcctgaaccccgcccagcagaacctgtacatgaacgtgatgctggagaactacaagaacctggtgttcctgggcgtggccgtgagcaagcaggaccccgtgacctgcctggagcaggagaaggagccctgg

SEQ ID NO: 953 - DNA, 240 bp, Artificial sequence
  Synthetic
cccctgcagggcagcgtgagcttcaaggacgtgaccgtggacttcacccaggaggagtggcagcagctggaccccgcccagaaggccctgtacagagatgtgatgctggagaactactgccacttcgtgagcgtgggcttccacatggccaagcccgacatgatcagaaagctggagcagggcgaggagctgtggacccagagaatcttccccagctacagctacctggaggaggacggc

SEQ ID NO: 954 - DNA, 240 bp, Artificial sequence
  Synthetic
cccggcccccccagaagcctggagatgggcctgctgaccttcagagatgtggccatcgagttcagcctggaggagtggcagcacctggacatcgcccagcagaacctgtacagaaacgtgatgctggagaactacagaaacctggccttcctgggcatcgccgtgagcaagcccgacctgatcacctgcctggagcagggcaaggagccctggaacatgaagagacacgagatggtggac

SEQ ID NO: 955 - DNA, 240 bp, Artificial sequence
  Synthetic
agcggccaccccggcagctgggagatgaacagcgtggccttcgaggacgtggccgtgaacttcacccaggaggagtgggccctgctggaccccagccagaagaacctgtacagagatgtgatgcaggagaccttcagaaacctggccagcatcggcaacaagggcgaggaccagagcatcgaggaccagtacaagaacagcagcagaaacctgagacacatcatcagccacagcggcaac

SEQ ID NO: 956 - DNA, 240 bp, Artificial sequence
  Synthetic
agctacggcagcatcaccttcggcgacgtggccatcgacttcagccaccaggagtgggagtacctgagcctggtgcagaagaccctgtaccaggaggtgatgatggagaactacgacaacctggtgagcctggccggccacagcgtgagcaagcccgacctgatcaccctgctggagcagggcaaggagccctggatgatcgtgagagaggagaccagaggcgagtgcaccgacctggac

SEQ ID NO: 957 - DNA, 240 bp, Artificial sequence
  Synthetic
gacctgttcgtgtgcagcggcctggagccccacacccccagcgtgggcagccaggaaagcgtgaccttccaggacgtggccgtggacttcaccgagaaggagtggcccctgctggacagcagccagagaaagctgtacaaggacgtgatgctggagaactacagcaacctgaccagcctgggctaccaggtgggcaagcccagcctgatcagccacctggagcaggaggaggagcccaga

SEQ ID NO: 958 - DNA, 240 bp, Artificial sequence
  Synthetic
ttccagaccgcctggagacaggagcccgtgaccttcgaggacgtggccgtgtacttcacccagaacgagtgggccagcctggacagcgtgcagagagccctgtacagagaggtgatgctggagaactacgccaacgtggccagcctggccttccccttcaccacccccgtgctggtgagccagctggagcagggcgagctgccctggggactggacccctgggagcctatgggcagagag

SEQ ID NO: 959 - DNA, 240 bp, Artificial sequence
  Synthetic
gagctgctgaccttcagagatgtggccatcgagttcagccccgaggagtggaagtgcctggaccccgaccagcagaacctgtacagagatgtgatgctggagaactacagaaacctggtgagcctgggcgtggccatcagcaaccccgacctggtgacctgcctggagcagagaaaggagccctacaacgtgaagatccacaagatcgtggccagaccccccgccatgtgcagccacttc

SEQ ID NO: 960 - DNA, 240 bp, Artificial sequence
  Synthetic
gccggcgaggccgaggcccagctggaccccagcctgcagggcctggttatgttcgaggacgtgaccgtgtacttcagcagagaggagtggggcctgctgaacgtgacccagaagggcctgtacagagatgtgatgctggagaacttcgccctggtgagcagcctgggcctggcccccagcagaagccccgtgttcacccagctggaggacgacgagcagagctgggtgcccagctgggtg

SEQ ID NO: 961 - DNA, 240 bp, Artificial sequence
  Synthetic
gcccacgccctggtgaccttcagagatgtggccatcgacttcagccagaaggagtgggagtgcctggacaccacccagagaaagctgtacagagatgtgatgctggagaactacaacaacctggtgagcctgggctacagcggcagcaagcccgacgtgatcaccctgctggagcagggcaaggagccctgcgtggtggccagagatgtgaccggcagacagtgccccggcctgctgagc

SEQ ID NO: 962 - DNA, 240 bp, Artificial sequence
  Synthetic
aagagaatcaagcactggaagatggccagcaagctgatcctgcccgagagcctgagcctgctgaccttcgaggacgtggccgtgtacttcagcgaggaggagtggcagctgctgaaccccctggagaagaccctgtacaacgacgtgatgcaggacatctacgagaccgtgatcagcctgggcctgaagctgaagaacgacaccggcaacgaccaccccatcagcgtgagcaccagcgag

SEQ ID NO: 963 - DNA, 240 bp, Artificial sequence
  Synthetic
gacagcgtggtgttcgaggacgtggccgtggacttcaccctggaggagtgggccctgctggacagcgcccagagagacctgtacagagatgtgatgctggagaccttccagaacctggccagcgtggacgacgagacccagttcaaggccagcggcagcgtgagccagcaggacatctacggcgagaagatccccaaggagagcaagatcgccaccttcaccagaaacgtgagctgggcc

SEQ ID NO: 964 - DNA, 240 bp, Artificial sequence
  Synthetic
aacatgagccaggccagcgtgagcttccaggacgtgaccgtggagttcaccagagaggagtggcagcacctgggccccgtggagagaaccctgtacagagatgtgatgctggagaactacagccacctgatcagcgtgggctactgcatcaccaagcccaaggtgatcagcaagctggagaagggcgaggagccctggagcctggaggacgagttcctgaaccagagataccccggctac

SEQ ID NO: 965 - DNA, 240 bp, Artificial sequence
  Synthetic
atcagcttccaggagagcgtgaccttccaggacgtggccgtggacttcaccgccgaggagtggcagctgctggactgcgccgagagaaccctgtactgggacgtgatgctggagaactacagaaacctgatcagcgtgggctgccccatcaccaagaccaaggtgatcctgaaggtggagcagggccaggagccctggatggtggagggcgccaacccccacgagagcagccccgagagc

SEQ ID NO: 966 - DNA, 240 bp, Artificial sequence
  Synthetic
aacaccctgcagggccccgtgagcttcaaggacgtggccgtggacttcacccaggaggagtggcagcagctggaccccgacgagaagatcacctacagagatgtgatgctggagaactacagccacctggtgagcgtgggctacgacaccaccaagcccaacgtgatcatcaagctggagcagggcgaggagccctggatcatgggcggcgagttcccctgccagcacagccccgaggcc

SEQ ID NO: 967 - DNA, 240 bp, Artificial sequence
  Synthetic
caccccgaggaggaggagagaatgcacgacgagctgctgcaggccgtgagcaagggccccgtgatgttcagagatgtgagcatcgacttcagccaggaggagtgggagtgcctggacgccgaccagatgaacctgtacaaggaggtgatgctggagaacttcagcaacctggtgagcgtgggcctgagcaacagcaagcccgccgtgatcagcctgctggagcagggcaaggagccctgg

SEQ ID NO: 968 - DNA, 240 bp, Artificial sequence
  Synthetic
agcctgggcagcgagctgttcagagatgtggccatcgtgttcagccaggaggagtggcagtggctggcccccgcccagagagacctgtacagagatgtgatgctggagacctacagcaacctggtgagcctgggcctggccgtgagcaagcccgacgtgatcagcttcctggagcagggcaaggagccctggatggtggagagagtggtgagcggcggcctgtgccccgtgctggagagc

SEQ ID NO: 969 - DNA, 240 bp, Artificial sequence
  Synthetic
accaagttccaggagatggtgaccttcaaggacgtggccgtggtgttcaccgaggaggagctgggcctgctggacagcgtgcagagaaagctgtacagagatgtgatgctggagaacttcagaaacctgctgctggtggcccaccagcccttcaagcccgacctgatcagccagctggagagagaggagaagctgctgatggtggagaccgagacccccagagatggctgcagcggcaga

SEQ ID NO: 970 - DNA, 240 bp, Artificial sequence
  Synthetic
gccaagagacccggcccccccggcagcagagagatgggcctgctgaccttcagagacatcgccatcgagttcagcctggccgagtggcagtgcctggaccacgcccagcagaacctgtacagagatgtgatgctggagaactacagaaacctggtgagcctgggcatcgccgtgagcaagcccgacctgatcacctgcctggagcagaacaaggagccccagaacatcaagagaaacgag

SEQ ID NO: 971 - DNA, 240 bp, Artificial sequence
  Synthetic
acctgcatggtgcacagacagaccatgagctgcagcggcgccggcggcatcaccgccttcgtggccttcagagatgtggccgtgtacttcacccaggaggagtggagactgctgagccccgcccagagaaccctgcacagagaggtgatgctggagacctacaaccacctggtgagcctggagatccccagcagcaagcccaagctgatcgcccagctggagagaggcgaggccccctgg

SEQ ID NO: 972 - DNA, 240 bp, Artificial sequence
  Synthetic
atccaggcccaggagagcatcaccctggaggacgtggccgtggacttcacctgggaggagtggcagctgctgggcgccgcccagaaggacctgtacagagatgtgatgctggagaactacagcaacctggtggccgtgggctaccaggccagcaagcccgacgccctgttcaagctggagcagggcgagcagctgtggaccatcgaggacggcatccacagcggcgcctgcagcgacatc

SEQ ID NO: 973 - DNA, 240 bp, Artificial sequence
  Synthetic
gcccagaagagaagaaagagaaaggccaaggagagcggcatggccctgccccagggccacctgaccttcagagatgtggccatcgagttcagccaggccgagtggaagtgcctggaccccgcccagagagccctgtacaaggacgtgatgctggagaactacagaaacctggtgagcctgggcatcagcctgcccgacctgaacatcaacagcatgctggagcagagaagagagccctgg

SEQ ID NO: 974 - DNA, 240 bp, Artificial sequence
  Synthetic
gacagcaccagcgtgcccgtgaccgccgaggccaagctgatgggcttcacccagggctgcgtgaccttcgaggacgtggccatctacttcagccaggaggagtggggcctgctggacgaggcccagagactgctgtacagagatgtgatgctggagaacttcgccctgatcaccgccctggtgtgctggcacggcatggaggacgaggagacccccgagcagagcgtgagcgtggagggc

SEQ ID NO: 975 - DNA, 240 bp, Artificial sequence
  Synthetic
ggccccctgaccttcagagatgtgaagatcgagttcagcctggaggagtggcagtgcctggacaccgcccagagaaacctgtacagagatgtgatgctggagaactacagaaacctggtgttcctgggcatcgccgtgagcaagcccgacctgatcacctggctggagcagggcaaggagccctggaacctgaagagacacgagatggtggacaagacccccgtgatgtgcagccacttc

SEQ ID NO: 976 - DNA, 240 bp, Artificial sequence
  Synthetic
agcggctgccccggcgccgagagaagcctgctggtgcagagctacttcgagaagggccccctgaccttcagagatgtggccatcgagttcagcctggaggagtggcagtgcctggacagcgcccagcagggcctgtacagaaaggtgatgctggagaactacagaaacctggtgttcctggccggcatcgccctgaccaagcccgacctgatcacctgcctggagcagggcaaggagccc

SEQ ID NO: 977 - DNA, 240 bp, Artificial sequence
  Synthetic
ggcgtgctgaccttcagagatgtggccgtggagttcagccccgaggagtgggagtgcctggacagcgcccagcagagactgtacagagatgtgatgctggagaactacggcaacctggtgagcctgggcctggccatcttcaagcccgacctgatgacctgcctggagcagagaaaggagccctggaaggtgaagagacaggaggccgtggccaagcaccccgccggcagcttccacttc

SEQ ID NO: 978 - DNA, 240 bp, Artificial sequence
  Synthetic
aaggagaacctggaggacatcagcggctggggcctgcccgaggccagaagcaaggagagcgtgagcttcaaggacgtggccgtggacttcacccaggaggagtggggccagctggacagcccccagagagccctgtacagagatgtgatgctggagaactaccagaacctgctggccctgggcccccccctgcacaagcccgacgtgatcagccacctggagagaggcgaggagccctgg

SEQ ID NO: 979 - DNA, 240 bp, Artificial sequence
  Synthetic
gaggagagcgagaagcccagaggcttcgccagaggcctggagcccgagagaatcatcggcgccaccgacagcagcggcgagctgatgttcctgatgaagtggaagaacagcgacgaggccgacctggtgcccgccaaggaggccaacgtgaagtgcccccaggtggtgatcagcttctacgaggagagactgacctggcacagctaccccagcgaggacgacgacaagaaggacgacaag

SEQ ID NO: 980 - DNA, 240 bp, Artificial sequence
  Synthetic
gccagcgtggccctggaggacgtggccgtgaacttcaccagagaggagtgggccctgctgggcccctgccagaagaacctgtacaaggacgtgatgcaggagaccatcagaaacctggactgcgtggtgatgaagtggaaggaccagaacatcgaggaccagtacagataccccagaaagaacctgagatgcagaatgctggagagattcgtggagagcaaggacggcacccagtgcggc

SEQ ID NO: 981 - DNA, 240 bp, Artificial sequence
  Synthetic
accctgctgaccttcagagatgtggccatcgagttcagcctggaggagtggaagtgcctggacctggcccagcagaacctgtacagagatgtgatgctggagaactacagaaacctgttcagcgtgggcctgaccgtgtgcaagcccggcctgatcacctgcctggagcagagaaaggagccctggaacgtgaagagacaggaggccgccgacggccaccccgagatgggcttccaccac

SEQ ID NO: 982 - DNA, 240 bp, Artificial sequence
  Synthetic
gccgccgccctgagagcccccacccagcaggtgttcgtggccttcgaggacgtggccatctacttcagccaggaggagtgggagctgctggacgagatgcagagactgctgtacagagatgtgatgctggagaacttcgccgtgatggccagcctgggctgctggtgcggcgccgtggacgagggaacacctagcgccgagagcgtgagcgtggaggagctgagccagggcagaaccccc

SEQ ID NO: 983 - DNA, 240 bp, Artificial sequence
  Synthetic
aacaccttccaggccagcgtgagcttccaggacgtgaccgtggagttcagccaggaggagtggcagcacatgggccccgtggagagaaccctgtacagagatgtgatgctggagaactacagccacctggtgagcgtgggctactgcttcaccaagcccgagctgatcttcaccctggagcagggcgaggacccctggctgctggagaaggagaagggcttcctgagcagaaacagcccc

SEQ ID NO: 984 - DNA, 240 bp, Artificial sequence
  Synthetic
gacagcgtggccttcgaggacgtgagcgtgagcttcagccaggaggagtgggccctgctggcccccagccagaagaagctgtacagagatgtgatgcaggagaccttcaagaacctggccagcatcggcgagaagtgggaggaccccaacgtggaggaccagcacaagaaccagggcagaaacctgagaagccacaccggcgagagactgtgcgagggcaaggagggcagccagtgcgcc

SEQ ID NO: 985 - DNA, 240 bp, Artificial sequence
  Synthetic
gcccagggcctggtgaccttcgccgacgtggccatcgacttcagccaggaggagtgggcctgcctgaacagcgcccagagagacctgtactgggacgtgatgctggagaactacagcaacctggtgagcctggacctggagagcgcctacgagaacaagagcctgcccaccgagaagaacatccacgagatcagagccagcaagagaaacagcgacagaagaagcaagagcctgggcaga

SEQ ID NO: 986 - DNA, 240 bp, Artificial sequence
  Synthetic
gccgtggacctgctgagcgcccaggagcccgtgaccttcagagatgtggccgtgttcttcagccaggacgagtggctgcacctggacagcgcccagagagccctgtacagagaggtgatgctggagaactacagcagcctggtgagcctgggcatccccttcagcatgcccaagctgatccaccagctgcagcagggcgaggacccctgcatggtggagagagaggtgcccagcgacacc

SEQ ID NO: 987 - DNA, 240 bp, Artificial sequence
  Synthetic
agcccccagagattccccgccctgatccccggcgagcccggcagaagcttcgagggcagcgtgagcttcgaggacgtggccgtggacttcaccagacaggagtggcacagactggaccccgcccagagaaccatgcacaaggacgtgatgctggagacctacagcaacctggccagcgtgggcctgtgcgtggccaagcccgagatgatcttcaagctggagagaggcgaggagctgtgg

SEQ ID NO: 988 - DNA, 240 bp, Artificial sequence
  Synthetic
agagtgctgaccttcagagatgtggccgtggagttcagccccgaggagtgggagtgcctggacagcgcccagcagagactgtacagagatgtgatgctggagaactacggcaacctgttcagcctgggcctggccatcttcaagcccgacctgatcacctacctggagcagagaaaggagccctggaacgccagaagacagaagaccgtggccaagcaccccgccggcagcctgcacttc

SEQ ID NO: 989 - DNA, 240 bp, Artificial sequence
  Synthetic
gccgagaccaaggacgccgcccagatgctggtgaccttcaaggacgtggccgtgaccttcaccagagaggagtggagacagctggacctggcccagagaaccctgtacagagaggtgatgctggagacctgcggcctgctggtgagcctgggccacagagtgcccaagcccgagctggtgcacctgctggagcacggccaggagctgtggatcgtgaagagaggcctgagccacgccacc

SEQ ID NO: 990 - DNA, 240 bp, Artificial sequence
  Synthetic
atcgagtaccagatccccgtgagcttcaaggacgtggtggtgggcttcacccaggaggagtggcacagactgagccccgcccagagagccctgtacagagatgtgatgctggagacctacagcaacctggtgagcgtgggctacgagggcaccaagcccgacgtgatcctgagactggagcaggaggaggccccctggatcggcgaggccgcttgccctggatgccactgctgggaggac

SEQ ID NO: 991 - DNA, 240 bp, Artificial sequence
  Synthetic
accaagttccaggaggccgtgaccttcaaggacgtggccgtggccttcaccgaggaggagctgggcctgctggacagcgcccagagaaagctgtacagagatgtgatgctggagaacttcagaaacctggtgagcgtgggccaccagagcttcaagcccgacatgatcagccagctggagagagaggagaagctgtggatgaaggagctgcagacccagagaggcaagcacagcggcgac

SEQ ID NO: 992 - DNA, 240 bp, Artificial sequence
  Synthetic
gacgagggcgtggccggcgtgatgagcgtgggcccccccgctgctagacttcaggagcccgtgaccttcagagatgtggccgtggacttcacccaggaggagtggggccagctggaccccacccagagaatcctgtacagagatgtgatgctggagaccttcggccacctgctgagcatcggccccgagctgcccaagcccgaggtgatcagccagctggagcagggcaccgagctgtgg

SEQ ID NO: 993 - DNA, 240 bp, Artificial sequence
  Synthetic
ggccccctgaccttcatggacgtggccatcgagttcagcgtggaggagtggcagtgcctggacaccgcccagcagaacctgtacagaaacgtgatgctggagaactacagaaacctggtgttcctgggcatcgccgtgagcaagcccgacctgatcacctgcctggagcagggcaaggagccctggaacatggagagacacgagatggtggccaagccccccggcatgtgctgctacttc

SEQ ID NO: 994 - DNA, 240 bp, Artificial sequence
  Synthetic
caccaggtgggcctgatcagaagctacaacagcaagaccatgacctgcttccaggagctggtgaccttcagagatgtggccatcgacttcagcagacaggagtgggagtacctggaccccaaccagagagacctgtacagagatgtgatgctggagaactacagaaacctggtgagcctgggcggccacagcatcagcaagcccgtggtggtggacctgctggagagaggcaaggagccc

SEQ ID NO: 995 - DNA, 240 bp, Artificial sequence
  Synthetic
aacgccaccatcgtgatgagcgtgagaagagagcagggcagcagcagcggcgagggcagcctgagcttcgaggacgtggccgtgggcttcaccagagaggagtggcagttcctggaccagagccagaaggtgctgtacaaggaggtgatgctggagaactacatcaacctggtgagcatcggctacagaggcaccaagcccgacagcctgttcaagctggagcagggcgagccccccggc

SEQ ID NO: 996 - DNA, 240 bp, Artificial sequence
  Synthetic
ttcccccccgccagaggcaaggagctgctgagcttcgaggacgtggccatgtacttcaccagagaggagtggggccacctgaactggggccagaaggacctgtacagagatgtgatgctggagaactacagaaacatggtgctgctgggcttccagttccccaagcccgagatgatctgccagctggagaactgggacgagcagtggatcctggacctgcccagaaccggcaacagaaag

SEQ ID NO: 997 - DNA, 240 bp, Artificial sequence
  Synthetic
gagctgctgaccttcaaggacgtggccatcgagttcagccccgaggagtggaagtgcctggacaccagccagcagaacctgtacagagatgtgatgctggagaactacagaaacctggtgagcctgggcgtgagcatcagcaaccccgacctggtgaccagcctggagcagagaaaggagccctacaacctgaagatccacgagaccgccgccagaccccccgccgtgtgcagccacttc

SEQ ID NO: 998 - DNA, 240 bp, Artificial sequence
  Synthetic
atgaagagccagggcctggtgagcttcaaggacgtggccgtggacttcacccaggaggagtggcagcagctggaccccagccagagaaccctgtacagagatgtgatgctggagaactacagccacctggtgagcatgggctaccccgtgagcaagcccgacgtgatcagcaagctggagcagggcgaggagccctggatcatcaagggcgacatcagcaactggatctaccccgacgag

SEQ ID NO: 999 - DNA, 240 bp, Artificial sequence
  Synthetic
gccgagggcagcgtgatgttcagcgacgtgagcatcgacttcagccaggaggagtgggactgcctggaccccgtgcagagagacctgtacagagatgtgatgctggagaactacggcaacctggtgagcatgggcctgtacacccccaagccccaggtgatcagcctgctggagcagggcaaggagccctggatggtgggcagagagctgaccagaggcctgtgcagcgacctggagagc

SEQ ID NO: 1000 - DNA, 240 bp, Artificial sequence
  Synthetic
ggccccctgaccttcaccgacgtggccatcgagttcagcctggaggagtggcagtgcctggacaccgcccagcagaacctgtacagaaacgtgatgctggagaactacagaaacctggtgttcctgggcatcgccgtgagcaagcccgacctgatcacctgcctggagaaggagaaggagccctgcaagatgaagagacacgagatggtggacgagccccccgtggtgtgcagccacttc

SEQ ID NO: 1001 - DNA, 240 bp, Artificial sequence
  Synthetic
gccctgagccagggcctgttcaccttcaaggacgtggccatcgagttcagccaggaggagtgggagtgcctggaccccgcccagagagccctgtacagagatgtgatgctggagaactacagaaacctgctgagcctggacgaggacaacatcccccccgaggacgacatcagcgtgggcttcaccagcaagggcctgagccccaaggagaacaacaaggaggagctgtaccacctggtg

SEQ ID NO: 1002 - DNA, 240 bp, Artificial sequence
  Synthetic
aacatggagggcctggtgatgttccaggacctgagcatcgacttcagccaggaggagtgggagtgcctggacgccgcccagaaggacctgtacagagatgtgatgatggagaactacagcagcctggtgagcctgggcctgagcatccccaagcccgacgtgatcagcctgctggagcagggcaaggagccctggatggtgagcagagatgtgctgggcggctggtgcagagacagcgag

SEQ ID NO: 1003 - DNA, 240 bp, Artificial sequence
  Synthetic
gccgtgagccacctgcccaccatggtgcaggagagcgtgaccttcaaggacgtggccatcctgttcacccaggaggagtggggccagctgagccccgcccagagagccctgtacagagatgtgatgctggagaactacagcaacctggtgagcctgggcctgctgggccccaagcccgacaccttcagccagctggagaagagagaggtgtggatgcccgaggacacccccggcggcttc

SEQ ID NO: 1004 - DNA, 240 bp, Artificial sequence
  Synthetic
ggccccctgaccatcagagatgtgaccgtggagttcagcctggaggagtggcactgcctggacaccgcccagcagaacctgtacagagatgtgatgctggagaactacagaaacctggtgttcctgggcatcgccgtgagcaagcccgacctgatcacctgcctggagcagggcaaggagccctgcaacatgaagagacacgagatggtggccaagccccccgtgatgtgcagccacatc

SEQ ID NO: 1005 - DNA, 240 bp, Artificial sequence
  Synthetic
gccgccgccgtgctgaccgacagagcccaggtgagcgtgaccttcgacgacgtggccgtgaccttcaccaaggaggagtggggccagctggacctggcccagagaaccctgtaccaggaggtgatgctggagaactgcggcctgctggtgagcctgggctgccccgtgcccaaggccgagctgatctgccacctggagcacggccaggagccctggaccagaaaggaggacctgagccag

SEQ ID NO: 1006 - DNA, 240 bp, Artificial sequence
  Synthetic
gccctgagaagcgtgatgttcagcgacgtgagcatcgacttcagccccgaggagtgggagtacctggacctggagcagaaggacctgtacagagatgtgatgctggagaactacagcaacctggtgagcctgggctgcttcatcagcaagcccgacgtgatcagcagcctggagcagggcaaggagccctggaaggtggtgagaaagggcagaagacagtaccccgacctggagaccaag

SEQ ID NO: 1007 - DNA, 240 bp, Artificial sequence
  Synthetic
gcccacggcagcgtgaccttcagagatgtggccatcgacttcagccaggaggagtgggagttcctggaccccgcccagagagacctgtacagagatgtgatgtgggagaactacagcaacttcatcagcctgggccccagcatcagcaagcccgacgtgatcaccctgctggacgaggagagaaaggagcccggcatggtggtgagagagggcaccagaagatactgccccgacctggag

SEQ ID NO: 1008 - DNA, 240 bp, Artificial sequence
  Synthetic
gcccccagagcccagatccagggccccctgaccttcggcgacgtggccgtggccttcaccagaatcgagtggagacacctggacgccgcccagagagccctgtacagagatgtgatgctggagaactacggcaacctggtgagcgtgggcctgctgagcagcaagcccaagctgatcacccagctggagcagggcgccgagccctggaccgaggtgagagaggcccctagcggcacacac

SEQ ID NO: 1009 - DNA, 240 bp, Artificial sequence
  Synthetic
ggccccctgcagttcagagatgtggccatcgagttcagcctggaggagtggcactgcctggacaccgcccagagaaacctgtacagaaacgtgatgctggagaactacagaaacctggtgttcctgggcatcgtggtgagcaagcccgacctgatcacctgcctggagcagggcaagaagcccctgaccatgaagaagcacgagatggtggccaaccccagcgtgacctgcagccacttc

SEQ ID NO: 1010 - DNA, 240 bp, Artificial sequence
  Synthetic
accctgcccagaggccagcccgaggtgctggagtggggcctgcccaaggaccaggacagcgtggccttcgaggacgtggccgtgaacttcacccacgaggagtgggccctgctgggccccagccagaagaacctgtacagagatgtgatgagagagaccatcagaaacctgaactgcatcggcatgaagtgggagaaccagaacatcgacgaccagcaccagaacctgagaagaaacccc

SEQ ID NO: 1011 - DNA, 240 bp, Artificial sequence
  Synthetic
cccagccccgacagcatgaccttcgaggacatcatcgtggacttcacccaggaggagtgggccctgctggacaccagccagagaaagctgttccaggacgtgatgctggagaacatcagccacctggtgagcatcggcaagcagctgtgcaagagcgtggtgctgagccagctggagcaggtggagaagctgagcacccagagaatcagcctgctgcagggcagagaggtgggcatcaag

SEQ ID NO: 1012 - DNA, 240 bp, Artificial sequence
  Synthetic
gaggagagcagagagatcagagccggccagatcgtgctgaaggccatggcccagggcctggtgaccttcagagatgtggccatcgagttcagcctggaggagtggaagtgcctggagcccgcccagagagacctgtacagagaggtgaccctggagaacttcggccacctggccagcctgggcctgagcatcagcaagcccgacgtggtgagcctgctggagcagggcaaggagccctgg

SEQ ID NO: 1013 - DNA, 240 bp, Artificial sequence
  Synthetic
gccgccagcgcccaggtgagcgtgaccttcgaggacgtggccgtgaccttcacccaggaggagtggggccagctggacgccgcccagagaaccctgtaccaggaggtgatgctggagacctgcggcctgctgatgagcctgggctgccccctgttcaagcccgagctgatctaccagctggaccacagacaggagctgtggatggccaccaaggacctgagccagagcagctaccccggc

SEQ ID NO: 1014 - DNA, 240 bp, Artificial sequence
  Synthetic
agagagagcctggaggacgaggtgacccccggcctgcccaccgccgagagccaagagctgctgaccttcaaggacatcagcatcgacttcacccaggaggagtggggccagctggcccccgcccaccagaacctgtacagagaggtgatgctggagaactacagcaacctggtgagcgtgggctaccagctgagcaagcccagcgtgatcagccagctggagaagggcgaggagccctgg

SEQ ID NO: 1015 - DNA, 240 bp, Artificial sequence
  Synthetic
gagggcgagtacatcaagctgaaggtgatcggccaggacagcagcgagatccacttcaaggtgaagatgaccacccacctgaagaagctgaaggagagctactgccagagacagggcgtgcccatgaacagcctgagattcctgttcgagggccagagaatcgccgacaaccacacccccaaggagctgggcatggaggaggaggacgtgatcgaggtgtaccaggagcagaccggcggc

SEQ ID NO: 1016 - DNA, 240 bp, Artificial sequence
  Synthetic
aacaagagcctgggccccgtgagcttcaaggacgtggccgtggacttcacccaggaggagtggcagcagctggaccccgagcagaagatcacctacagagatgtgatgctggagaactacagcaacctggtgagcgtgggctaccacatcatcaagcccgacgtgatcagcaagctggagcagggcgaggagccctggatcgtggagggcgagttcctgctgcagagctaccccgacgag

SEQ ID NO: 1017 - DNA, 240 bp, Artificial sequence
  Synthetic
agccccggcctgctgaccaccagaaaggaggccctgatggccttcagagatgtggccgtggccttcacccagaaggagtggaagctgctgagcagcgcccagagaaccctgtacagagaggtgatgctggagaactacagccacctggtgagcctgggcatcgccttcagcaagcccaagctgatcgagcagctggagcagggcgacgagccctggagagaggagaacgagcacctgctg

SEQ ID NO: 1018 - DNA, 240 bp, Artificial sequence
  Synthetic
atgttccaggacagcgtggccttcgaggacgtggccgtgaccttcacccaggaggagtgggccctgctggaccccagccagaagaacctgtgcagagatgtgatgcaggagaccttcagaaacctggccagcatcggcaagaagtggaagccccagaacatctacgtggagtacgagaacctgagaagaaacctgagaatcgtgggcgagagactgttcgagagcaaggagggccaccag

SEQ ID NO: 1019 - DNA, 240 bp, Artificial sequence
  Synthetic
gagaacgaccacatcaacctgaaggtggccggccaggacggcagcgtggtgcagttcaagatcaagagacacacccccctgagcaagctgatgaaggcctactgcgagagacagggcctgagcatgagacagatcagattcagattcgacggccagcccatcaacgagaccgacacccccgcccagctggagatggaggacgaggacaccatcgacgtgttccagcagcagaccggcggc

SEQ ID NO: 1020 - DNA, 240 bp, Artificial sequence
  Synthetic
cccggccccctgggcagcctggagatgggcgtgctgaccttcagagatgtggccctggagttcagcctggaggagtggcagtgcctggacaccgcccagcagaacctgtacagaaacgtgatgctggagaactacagaaacctggtgttcgtgggcatcgccgccagcaagcccgacctgatcacctgcctggagcagggcaaggagccctggaacgtgaagagacacgagatggtgacc

SEQ ID NO: 1021 - DNA, 240 bp, Artificial sequence
  Synthetic
ctgagccagaagccccaggtgctgggccccgagaagcaggacggcagctgcgaggctagcgtgagcttcgaggacgtgaccgtggacttcagcagagaggagtggcagcagctggaccccgcccagagatgcctgtacagagatgtgatgctggagctgtacagccacctgttcgccgtgggctaccacatccccaaccccgaggtgatcttcagaatgctgaaggagaaggagcccaga

SEQ ID NO: 1022 - DNA, 240 bp, Artificial sequence
  Synthetic
gccctgacccagggccaggtgaccttcagagatgtggccatcgagttcagccaggaggagtggacctgcctggaccccgcccagagaaccctgtacagagatgtgatgctggagaactacagaaacctggccagcctgggcatcagctgcttcgacctgagcatcatcagcatgctggagcagggcaaggagcccttcaccctggagagccaggtgcagatcgccggcaaccccgacggc

SEQ ID NO: 1023 - DNA, 240 bp, Artificial sequence
  Synthetic
aacaagttccagggccccgtgaccctgaaggacgtgatcgtggagttcaccaaggaggagtggaagctgctgacccccgcccagagaaccctgtacaaggacgtgatgctggagaactacagccacctggtgagcgtgggctaccacgtgaacaagcccaacgccgtgttcaagctgaagcagggcaaggagccctggatcctggaggtggagttcccccacagaggcttccccgaggac

SEQ ID NO: 1024 - DNA, 240 bp, Artificial sequence
  Synthetic
gagctgctgaccttcagagatgtggccatcgagttcagccccgaggagtggaagtgcctggaccccgcccagcagaacctgtacagagatgtgatgctggagaactacagaaacctggtgagcctggccgtgtacagctactacaaccagggcatcctgcccgagcagggcatccaggacagcttcaagaaggccaccctgggcagatacggcagctgcggcctggagaacatctgcctg

SEQ ID NO: 1025 - DNA, 240 bp, Artificial sequence
  Synthetic
agcccccagaagagcagcgccctggcccccgaggaccacggcagcagctacgagggaagcgtgagcttcagagatgtggccatcgacttcagcagagaggagtggagacacctggacctgagccagagaaacctgtacagagatgtgatgctggagacctacagccacctgctgagcgtgggctaccaggtgcccaagcccgaggtggtgatgctggagcagggcaaggagccctgggcc

SEQ ID NO: 1026 - DNA, 240 bp, Artificial sequence
  Synthetic
aacaacagccagggcagagtgaccttcgaggacgtgaccgtgaacttcacccagggcgagtggcagagactgaaccccgagcagagaaacctgtacagagatgtgatgctggagaactacagcaacctggtgagcgtgggccagggcgagaccaccaagcccgacgtgatcctgagactggagcagggcaaggagccctggctggaggaggaggaggtgctgggcagcggcagagccgag

SEQ ID NO: 1027 - DNA, 240 bp, Artificial sequence
  Synthetic
gccatggccctgcccatgcccggcccccaggaggccgtggtgttcgaggacgttgccgtgtacttcaccagaatcgagtggagctgcctggcccccgaccagcaggccctgtacagagatgtgatgctggagaactacggcaacctggccagcctgggcttcctggtggccaagcccgccctgatcagcctgctggagcagggcgaggagcccggagccctgatcctgcaggtggccgag

SEQ ID NO: 1028 - DNA, 240 bp, Artificial sequence
  Synthetic
gacagcagccagcacctggtgaccttcgaggacgtggccgtggacttcacccaggaggagtggaccctgctggaccaggcccagagagacctgtacagagatgtgatgctggagaactacaagaacctgatcatcctggccggcagcgagctgttcaagagaagcctgatgagcggcctggagcagatggaggagctgagaaccggcgtgaccggcgtgctgcaggagctggacctgcag

SEQ ID NO: 1029 - DNA, 240 bp, Artificial sequence
  Synthetic
accaccttcaaggaggccgtgaccttcaaggacgtggccgtgttcttcaccgaggaggagctgggcctgctggaccccgcccagagaaagctgtaccaggacgtgatgctggagaacttcaccaacctgctgagcgtgggccaccagcccttccaccccttccacttcctgagagaggagaagttctggatgatggagaccgccacccagagagagggcaacagcggcggcaagaccatc

SEQ ID NO: 1030 - DNA, 240 bp, Artificial sequence
  Synthetic
ggccccctgcagttcagagatgtggccatcgagttcagcctggaggagtggcactgcctggacatggcccagagaaacctgtacagagatgtgatgctggagaactacagaaacctggtgttcctgggcatcgtggtgagcaagcccgacctgatcacccacctggagcagggcaagaagcccagcaccatgcagagacacgagatggtggccaaccccagcgtgctgtgcagccacttc

SEQ ID NO: 1031 - DNA, 240 bp, Artificial sequence
  Synthetic
aacaagagccagggcagcgtgagcttcaccgacgtgaccgtggacttcacccaggaggagtgggagcagctggaccccagccagagaatcctgtacatggacgtgatgctggagaactacagcaacctgctgagcgtggaggtgtggaaggccgacgaccagatggagagagaccacagaaaccccgacgagcaggccagacagttcctgatcctgaagaaccagacccccatcgaggag

SEQ ID NO: 1032 - DNA, 240 bp, Artificial sequence
  Synthetic
gaggaggaggagatgaacgacggcagccagatggtgagaagccaggagagcctgaccttccaggacgtggccgtggacttcaccagagaggagtgggaccagctgtaccccgcccagaagaacctgtacagagatgtgatgctggagaactacagaaacctggtggccctgggctaccagctgtgcaagcccgaggtgatcgcccagctggagctggaggaggagtgggtgatcgagaga

SEQ ID NO: 1033 - DNA, 240 bp, Artificial sequence
  Synthetic
gaggaggccaccaagaagagcaaggagaaggagcccggcatggccctgccccagggcagactgaccttcagagatgtggccatcgagttcagcctggaggagtggaagtgcctgaaccccgcccagagagccctgtacagagccgtgatgctggagaactacagaaacctggagttcgtggacagcagcctgaagagcatgatggagttcagcagcaccagacacagcatcaccggcgag

SEQ ID NO: 1034 - DNA, 240 bp, Artificial sequence
  Synthetic
gagaagacccccgccggcagaatcgtggccgactgcctgaccgactgctaccaggacagcgtgaccttcgacgacgtggccgtggacttcacccaggaggagtggaccctgctggacagcacccagagaagcctgtacagcgacgtgatgctggagaactacaagaacctggccaccgtgggcggccagatcatcaagcccagcctgatcagctggctggagcaggaggagagcagaacc

SEQ ID NO: 1035 - DNA, 240 bp, Artificial sequence
  Synthetic
aagaccagaaagagaaagagaaaggccaaggagagcggcatggccctgctgcagggcctgctgaccttcagagatgtggccatcgagttcagccaggaggagtggaagtgcctggaccccgcccagagaaccctgtacagagatgtgatgctggagaactacagaaacctggtgagcctggacaccagcagcaagtgcatgatgaagatgttcagcagcaccggccagggcaacaccgag

SEQ ID NO: 1036 - DNA, 240 bp, Artificial sequence
  Synthetic
gccatgagccaggagagcctgaccttcaaggacgtgttcgtggacttcaccctggaggagtggcagcagctggacagcgcccagaagaacctgtacagagatgtgatgctggagaactacagccacctggtgagcgtgggccacctggtgggcaagcccgacgtgatcttcagactgggccccggcgacgagagctggatggccgacggcggcacacctgtgagaacctgcgccggcgag

SEQ ID NO: 1037 - DNA, 240 bp, Artificial sequence
  Synthetic
gacagcgtggccttcgaggacgtggccgtgaacttcaccctggaggagtgggccctgctggaccccagccagaagaacctgtacagagatgtgatgagagagaccttcagaaacctggccagcgtgggcaagcagtgggaggaccagaacatcgaggaccccttcaagatccccagaagaaacatcagccacatccccgagagactgtgcgagagcaaggagggcggccagggcgaggag

SEQ ID NO: 1038 - DNA, 240 bp, Artificial sequence
  Synthetic
atgttccaggacagcgtggccttcgaggacgtggccgtgagcttcacccaggaggagtgggccctgctggaccccagccagaagaacctgtacagagatgtgatgcaggagaccttcaagaacctgaccagcgtgggcaagacctggaaggtgcagaacatcgaggacgagtacaagaaccccagaagaaacctgagcctgatgagagagaagctgtgcgagagcaaggagagccaccac

SEQ ID NO: 1039 - DNA, 240 bp, Artificial sequence
  Synthetic
gccgtggtggccaccctgagactgagcgcccagggcaccgtgaccttcgaggacgtggccgtgaagttcacccaggaggagtggaacctgctgagcgaggcccagagatgcctgtacagagatgtgaccctggagaacctggccctgatgagcagcctgggctgctggtgcggcgtggaggacgaggccgcccctagcaagcagagcatctacatccagagagagacccaggtgagaacc

SEQ ID NO: 1040 - DNA, 240 bp, Artificial sequence
  Synthetic
gaggaggaggaggaggacgaggacgaggacgacctgctgaccgccggctgccaggagctggtgaccttcgaggacgtggccgtgtacttcagcctggaggagtgggagagactggaggccgaccagagaggcctgtaccaggaggtgatgcaggagaactacggcatcctggtgagcctgggctaccccatccccaagcccgacctgatcttcagactggagcagggcgaggagccctgg

SEQ ID NO: 1041 - DNA, 240 bp, Artificial sequence
  Synthetic
accaagttccaggagatggtgaccttcaaggacgtggccgtggtgttcaccagagaggagctgggcctgctggacctggcccagagaaagctgtaccaggacgtgatgctggagaacttcagaaacctgctgagcgtgggctaccagcccttcaagctggacgtgatcctgcagctgggcaaggaggacaagctgagaatgatggagaccgagatccagggcgacggctgcagcggccac

SEQ ID NO: 1042 - DNA, 240 bp, Artificial sequence
  Synthetic
gaggaggccgcccagaagagaaagggcaaggagcccggcatggccctgccccagggcagactgaccttcagagatgtggccatcgagttcagcctggccgagtggaagtgcctgaaccccagccagagagccctgtacagagaggtgatgctggagaactacagaaacctggaggccgtggacatcagcagcaagtgcatgatgaaggaggtgctgagcaccggccagggcaacaccgag

SEQ ID NO: 1043 - DNA, 240 bp, Artificial sequence
  Synthetic
gacaccgtggtgttcgaggacgtggtggtggacttcaccctggaggagtgggccctgctgaaccccgcccagagaaagctgtacagagatgtgatgctggagaccttcaagcacctggccagcgtggacaacgaggcccagctgaaggccagcggcagcatcagccagcaggacaccagcggcgagaagctgagcctgaagcagaagatcgagaagttcaccagaaagaacatctgggcc

SEQ ID NO: 1044 - DNA, 240 bp, Artificial sequence
  Synthetic
accaccttcaaggagggcctgaccttcaaggacgtggccgtggtgttcaccgaggaggagctgggcctgctggaccccgtgcagagaaacctgtaccaggacgtgatgctggagaacttcagaaacctgctgagcgtgggccaccaccccttcaagcacgacgtgttcctgctggagaaggagaagaagctggacatcatgaagaccgccacccagagaaagggcaagagcgccgacaag

SEQ ID NO: 1045 - DNA, 240 bp, Artificial sequence
  Synthetic
agcgccctgcagcaggagttctggaagatccagaccagcaacggcatccagatggacctggtgaccttcgacagcgtggccgtggagttcacccaggaggagtggaccctgctggaccccgcccagagaaacctgtacagcgacgtgatgctggagaactacaagaacctgagcagcgtgggctaccagctgttcaagcccagcctgatcagctggctggaggaggaggaggagctgagc

SEQ ID NO: 1046 - DNA, 240 bp, Artificial sequence
  Synthetic
gactgcgtgatcttcgaggaggtggccgtgaacttcacccccgaggagtgggccctgctggaccacgcccagagaagcctgtacagagatgtgatgctggagacctgcagaaacctggccagcctggactgctacatctacgtgagaaccagcggcagcagcagccagagagatgtgttcggcaacggcatcagcaacgacgaggagatcgtgaagttcaccggcagcgacagctggagc

SEQ ID NO: 1047 - DNA, 240 bp, Artificial sequence
  Synthetic
gagctgctgaccttcagagatgtgaccatcgagttcagcctggaggagtgggagttcctgaaccccgcccagcagagcctgtacagaaaggtgatgctggagaactacagaaacctggtgagcctgggcctgaccgtgagcaagcccgagctgatcagcagactggagcagagacaggagccctggaacgtgaagagacacgagaccatcgccaagccccccgccatgagcagccactac

SEQ ID NO: 1048 - DNA, 240 bp, Artificial sequence
  Synthetic
atcaagacccaggagagcctgaccctggaggacgtggccgtggagttcagctgggaggagtggcagctgctggacaccgcccagaagaacctgtacagagatgtgatggtggagaactacaaccacctggtgagcctgggctaccagaccagcaagcccgacgtgctgagcaagctggcccacggccaggagccctggaccaccgacgccaagatccagaacaagaactgccccggcatc

SEQ ID NO: 1049 - DNA, 240 bp, Artificial sequence
  Synthetic
cccgcccacgtgcccggcgaggccggccccagaagaaccagagagagcagacccggcgctgtgagcttcgccgacgtggccgtgtacttcagccccgaggagtgggagtgcctgagacccgcccagagagccctgtacagagatgtgatgagagagaccttcggccacctgggcgccctgggcttcagcgtgcccaagcccgccttcatcagctgggtggagggcgaggtggaggcctgg

SEQ ID NO: 1050 - DNA, 240 bp, Artificial sequence
  Synthetic
ggctgccccggcgaccaggtgacccccaccagaagcctgaccgcccagctgcaggagaccatgaccttcaaggacgtggaggtgaccttcagccaggacgagtggggctggctggacagcgcccagagaaacctgtacagagatgtgatgctggagaactacagaaacatggccagcctggtgggccccttcaccaagcccgccctgatcagctggctggaggccagagagccctggggc

SEQ ID NO: 1051 - DNA, 240 bp, Artificial sequence
  Synthetic
gccagagacctggtgatgttcagagatgtggccgtggacttcagccaggaggagtgggagtgcctgaacagctaccagagaaacctgtacagagatgtgatcctggagaactacagcaacctggtgagcctggccggctgcagcatcagcaagcccgacgtgatcaccctgctggagcagggcaaggagccctggatggtggtgagagatgagaagagaagatggaccctggacctggag

SEQ ID NO: 1052 - DNA, 240 bp, Artificial sequence
  Synthetic
accaccctgaaggaggccgtgaccttcaaggacgtggccgtggtgttcaccgaggaggagctgagactgctggacctggcccagagaaagctgtacagagaggtgatgctggagaacttcagaaacctgctgagcgtgggccaccagagcctgcacagagacaccttccacttcctgaaggaggagaagttctggatgatggagaccgccacccagagagagggcaacctgggcggcaag

SEQ ID NO: 1053 - DNA, 240 bp, Artificial sequence
  Synthetic
agcccccccagccccagaagcagcatggccgccgtggccctgagagacagcgcccagggcatgaccttcgaggacgtggccatctacttcagccaggaggagtgggagctgctggacgagagccagagattcctgtactgcgacgtgatgctggagaacttcgcccacgtgaccagcctgggctactgccacggcatggagaacgaggccatcgccagcgagcagagcgtgagcatccag

SEQ ID NO: 1054 - DNA, 240 bp, Artificial sequence
  Synthetic
gacgaggaggcccagaagagaaaggccaaggagagcggcatggccctgccccagggcagactgaccttcatggacgtggccatcgagttcagccaggaggagtggaagagcctggaccccggccagagagccctgtacagagatgtgatgctggagaactacagaaacctggtgttcctgggcatctgcctgcccgacctgagcatcatcagcatgctgaagcagagaagagagcccctg

SEQ ID NO: 1055 - DNA, 240 bp, Artificial sequence
  Synthetic
gccctgacccagggccccctgaagttcatggacgtggccatcgagttcagccaggaggagtggaagtgcctggaccccgcccagagaaccctgtacagagatgtgatgctggagaactacagaaacctggtgagcctgggcatctgcctgcccgacctgagcgtgaccagcatgctggagcagaagagagacccctggaccctgcagagcgaggagaagatcgccaacgaccccgacggc

SEQ ID NO: 1056 - DNA, 240 bp, Artificial sequence
  Synthetic
accatgttcaaggaggccgtgaccttcaaggacgtggccgtggtgttcaccgaggaggagctgggcctgctggacgtgagccagagaaagctgtacagagatgtgatgctggagaacttcagaaacctgctgagcgtgggccaccagctgagccacagagacaccttccacttccagagagaggagaagttctggatcatggagaccgccacccagagagagggcaacagcggcggcaag

SEQ ID NO: 1057 - DNA, 240 bp, Artificial sequence
  Synthetic
cagggcaccgtggccttcgaggacgtggccgtgaacttcagccaggaggagtggagcctgctgagcgaggtgcagagatgcctgtaccacgacgtgatgctggagaactgggtgctgatcagcagcctgggctgctggtgcggcagcgaggacgaggaggcccccagcaagaagagcatcagcatccagagagtgagccaggtgagcacccccggcgccggcgtgagccccaagaaggcc

SEQ ID NO: 1058 - DNA, 240 bp, Artificial sequence
  Synthetic
gccgaggccttcggcgacagcgaggaggacggcgaggacgtgttcgaggtggagaagatcctggacatgaagaccgagggcggcaaggtgctgtacaaggtgagatggaagggctacaccagcgacgacgacacctgggagcccgagatccacctggaggactgcaaggaggtgctgctggagttcagaaagaagatcgccgagaacaaggccaaggccgtgagaaaggacatccagaga

SEQ ID NO: 1059 - DNA, 240 bp, Artificial sequence
  Synthetic
gtgctgcagatgcagaacagcgagcaccacggccagagcatcaagacccagaccgacagcatcagcctggaggacgtggccgtgaacttcaccctggaggagtgggccctgctggaccccggccagagaaacatctacagagatgtgatgagagccaccttcaagaacctggcctgcatcggcgagaagtggaaggaccaggacatcgaggacgagcacaagaaccagggcagaaacctg

SEQ ID NO: 1060 - DNA, 240 bp, Artificial sequence
  Synthetic
gccatggccctgaccgaccccgcccaggtgagcgtgaccttcgacgacgtggccgtgaccttcacccaggaggagtggggccagctggacctggcccagagaaccctgtaccaggaggtgatgctggagaactgcggcctgctggtgagcctgggctgccccgtgcccagacccgagctgatctaccacctggagcacggccaggagccctggaccagaaaggaggacctgagccagggc

SEQ ID NO: 1061 - DNA, 240 bp, Artificial sequence
  Synthetic
gtgcacggcagcgtgaccttcagagatgtggccatcgacttcagccaggaggagtgggagtgcctgcagcccgaccagagaaccctgtacagagatgtgatgctggagaactacagccacctgatcagcctgggcagcagcatcagcaagcccgacgtgatcaccctgctggagcaggagaaggagccctggatcgtggtgagcaaggagaccagcagatggtaccccgacctggagagc

SEQ ID NO: 1062 - DNA, 240 bp, Artificial sequence
  Synthetic
gaccccgtggcctgcgaggacgtggccgtgaacttcacccaggaggagtgggccctgctggacatcagccagagaaagctgtacagagaggtgatgctggagaccttcagaaacctgaccagcatcggcaagaagtggaaggaccagaacatcgagtacgagtaccagaaccccagaagaaacttcagaagcctgatcgagggcaacgtgaacgagatcaaggaggacagccactgcggc

SEQ ID NO: 1063 - DNA, 240 bp, Artificial sequence
  Synthetic
atcaagttccaggagagagtgaccttcaaggacgtggccgtggtgttcaccaaggaggagctggccctgctggacaaggcccagatcaacctgtaccaggacgtgatgctggagaacttcagaaacctgatgctggtgagagatggcatcaagaacaacatcctgaacctgcaggccaagggcctgagctacctgagccaggaggtgctgcactgctggcagatctggaagcagagaatc

SEQ ID NO: 1064 - DNA, 240 bp, Artificial sequence
  Synthetic
ggccccctgaccttcagagatgtggccatcgagttcagcctgaaggagtggcagtgcctggacaccgcccagagaaacctgtacagaaacgtgatgctggagaactacagaaacctggtgttcctgggcatcaccgtgagcaagcccgacctgatcacctgcctggagcagggcaaggaggcctggagcatgaagagacacgagatcatggtggccaagcccaccgtgatgtgcagccac

SEQ ID NO: 1065 - DNA, 240 bp, Artificial sequence
  Synthetic
accatgagcaaggaggccgtgaccttcaaggacgtggccgtggtgttcaccgaggaggagctgggcctgctggacctggcccagagaaagctgtacagagatgtgatgctggagaacttcagaaacctgctgagcgtgggccaccagcccttccacagagacaccttccacttcctgagagaggagaagttctggatgatggacatcgccacccagagagagggcaacagcggcggcaag

SEQ ID NO: 1066 - DNA, 240 bp, Artificial sequence
  Synthetic
ggccccctggagttcagagatgtggccatcgagttcagcctggaggagtggcactgcctggacaccgcccagcagaacctgtacagagatgtgatgctggagaactacagacacctggtgttcctgggcatcgtggtgaccaagcccgacctgatcacctgcctggagcagggcaagaagcccttcaccgtgaagagacacgagatgatcgccaagagccccgtgatgtgcttccacttc

SEQ ID NO: 1067 - DNA, 240 bp, Artificial sequence
  Synthetic
ggccacaccgagggcggcgagctggtgaacgagctgctgaagagctggctgaagggcctggtgaccttcgaggacgtggccgtggagttcacccaggaggagtgggccctgctggaccccgcccagagaaccctgtacagagatgtgatgctggagaactgcagaaacctggccagcctgggcaaccaggtggacaagcccagactgatcagccagctggagcaggaggacaaggtgatg

SEQ ID NO: 1068 - DNA, 240 bp, Artificial sequence
  Synthetic
gccgagcccgccagcgtgaccgtgaccttcgacgacgtggccctgtacttcagcgagcaggagtgggagatcctggagaagtggcagaagcagatgtacaagcaggagatgaagaccaactacgagaccctggacagcctgggctacgccttcagcaagcccgacctgatcacctggatggagcagggcagaatgctgctgatcagcgagcagggctgcctggacaagaccagaagaacc

SEQ ID NO: 1069 - DNA, 240 bp, Artificial sequence
  Synthetic
cacagccaggccagcgccatcagccaggacagagaggagaagatcatgagccaggagcccctgagcttcaaggacgtggccgtggtgttcaccgaggaggagctggagctgctggacagcacccagagacagctgtaccaggacgtgatgcaggagaacttcagaaacctgctgagcgtgggcgagagaaaccccctgggcgacaagaacggcaaggacaccgagtacatccaggacgag

SEQ ID NO: 1070 - DNA, 240 bp, Artificial sequence
  Synthetic
ggcagcctggaggagggcagaagagccaccggcctgcccgccgcccaagtgcaggagcctgtgaccttcaaggacgtggccgtggacttcacccaggaggagtggggccagctggacctggtgcagagaaccctgtacagagatgtgatgctggagacctacggccacctgctgagcgtgggcaaccagatcgccaagcccgaggtgatcagcctgctggagcagggcgaggagccctgg

SEQ ID NO: 1071 - DNA, 240 bp, Artificial sequence
  Synthetic
accaccttcaaggaggccgtgaccttcaaggacgtggccgtggtgttcaccgaggaggagctgggcctgctggaccccgcccagagaaagctgtacagagatgtgatgctggagaacttcagaaacctgctgagcgtgggccaccagcccttccaccaggacacctgccacttcctgagagaggagaagttctggatgatgggcaccgccacccagagagagggcaacagcggcggcaag

SEQ ID NO: 1072 - DNA, 240 bp, Artificial sequence
  Synthetic
gccaagctgtacgaggccgtgaccttcaaggacgtggccgtgatcttcaccgaggaggagctgggcctgctggaccccgcccagagaaagctgtacagagatgtgatgctggagaacttcagaaacctgctgagcgtgggcggcaagatccagaccgagatggagaccgtgcccgaggccggcacccacgaggagttcagctgcaagcagatctgggagcagatcgccagcgacctgacc

SEQ ID NO: 1073 - DNA, 240 bp, Artificial sequence
  Synthetic
agaagcgacctgttcctgcccgacagccagaccaacgaggagagaaagcagtacgacagcgtggccttcgaggacgtggccgtgaacttcacccaggaggagtgggccctgctgggccccagccagaagagcctgtacagagatgtgatgtgggagaccatcagaaacctggactgcatcggcatgaagtgggaggacaccaacatcgaggaccagcacagaaaccccagaagaagcctg

SEQ ID NO: 1074 - DNA, 240 bp, Artificial sequence
  Synthetic
cccggcacccccggcagcctggagatgggcctgctgaccttcagagatgtggccatcgagttcagccccgaggagtggcagtgcctggacaccgcccagcagaacctgtacagaaacgtgatgctggagaactacagaaacctggccttcctgggcatcgccctgagcaagcccgacctgatcacctacctggagcagggcaaggagccctggaacatgaagcagcacgagatggtggac

SEQ ID NO: 1075 - DNA, 240 bp, Artificial sequence
  Synthetic
acccccggcgtgagagtgagcaccgaccccgagcaggtgaccttcgaggacgtggtggtgggcttcagccaggaggagtggggccagctgaagcccgcccagagaaccctgtacagagatgtgatgctggacaccttcagactgctggtgagcgtgggccactggctgcccaagcccaacgtgatcagcctgctggagcaggaggccgagctgtgggccgtggagagcagactgccccag

SEQ ID NO: 1076 - DNA, 240 bp, Artificial sequence
  Synthetic
gagcagacccaggccgccggcatggtggccggctggctgatcaactgctaccaggacgccgtgaccttcgacgacgtggccgtggacttcacccaggaggagtggaccctgctggaccccagccagagagacctgtacagagatgtgatgctggagaactacgagaacctggccagcgtggagtggagactgaagaccaagggccccgccctgagacaggacagaagctggttcagagcc

SEQ ID NO: 1077 - DNA, 240 bp, Artificial sequence
  Synthetic
cccagcgaggccaacagcatccagagcgccaacgccaccaccaagaccagcgagaccaaccacaccagcagacccagactgaagaacgtggacagaagcaccgcccagcagctggccgtgaccgtgggcaacgtgaccgtgatcatcaccgacttcaaggagaagaccagaagcagcagcaccagcagcagcaccgtgaccagcagcgccggcagcgagcagcagaaccagagcagcagc

SEQ ID NO: 1078 - DNA, 240 bp, Artificial sequence
  Synthetic
gccctgacccagggccagctgagcttcagcgacgtggccatcgagttcagccaggaggagtggaagtgcctggaccccggccagaaggccctgtacagagatgtgatgctggagaactacagaaacctggtgagcctgggcgaggacaacgtgagacccgaggcctgcatctgcagcggcatctgcctgcccgacctgagcgtgaccagcatgctggagcagaagagagacccctggacc

SEQ ID NO: 1079 - DNA, 240 bp, Artificial sequence
  Synthetic
gccgccgccgccgccctgagagcccccgcccagagcagcgttacattcgaggacgtggccgtgaacttcagcctggaggagtggagcctgctgaacgaggcccagagatgcctgtacagagatgtgatgctggagaccctgaccctgatcagcagcctgggctgctggcacggcggcgaggacgaggccgctcctagcaagcagagcacctgcatccacatctacaaggaccagggcggc

SEQ ID NO: 1080 - DNA, 240 bp, Artificial sequence
  Synthetic
gcccagggcagcgtgagcttcaacgacgtgaccgtggacttcacccaggaggagtggcagcacctggaccacgcccagaagaccctgtacatggacgtgatgctggagaactactgccacctgatcagcgtgggctgccacatgaccaagcccgacgtgatcctgaagctggagagaggcgaggagccctggaccagcttcgccggccacacctgcctggaggagaactggaaggccgag

SEQ ID NO: 1081 - DNA, 240 bp, Artificial sequence
  Synthetic
gaccccgtggccttcaaggacgtggccgtgaacttcacccaggaggagtgggccctgctggacatcagccagagaaagctgtacagagaggtgatgctggagaccttcagaaacctgaccagcctgggcaagagatggaaggaccagaacatcgagtacgagcaccagaaccccagaagaaacttcagaagcctgatcgaggagaaggtgaacgagatcaaggacgacagccactgcggc

SEQ ID NO: 1082 - DNA, 240 bp, Artificial sequence
  Synthetic
agcaaggacctggtgaccttcggcgacgtggccgtgaacttcagccaggaggagtgggagtggctgaaccccgcccagagaaacctgtacagaaaggtgatgctggagaactacagaagcctggtgagcctgggcgtgagcgtgagcaagcccgacgtgatcagcctgctggagcagggcaaggagccctggatggtgaagaaggagggcaccagaggcccctgccccgactgggagtac

SEQ ID NO: 1083 - DNA, 240 bp, Artificial sequence
  Synthetic
gacagcgtggccttcgaggacgtggccatcaacttcacctgcgaggagtgggccctgctgggccccagccagaagagcctgtacagagatgtgatgcaggagaccatcagaaacctggactgcatcggcatgatctggcagaaccacgacatcgaggaggaccagtacaaggacctgagaagaaacctgagatgccacatggtggagagagcctgcgagatcaaggacaacagccagtgc

SEQ ID NO: 1084 - DNA, 240 bp, Artificial sequence
  Synthetic
ggccccctgaccttcatggacgtggccatcgagttctgcctggaggagtggcagtgcctggacatcgcccagcagaacctgtacagaaacgtgatgctggagaactacagaaacctggtgttcctgggcatcgccgtgagcaagcccgacctgatcacctgcctggagcaggagaaggagccctgggagcccatgagaagacacgagatggtggccaagccccccgtgatgtgcagccac

SEQ ID NO: 1085 - DNA, 240 bp, Artificial sequence
  Synthetic
cagagcaacgacatcgccagaggcttcgagagaggcctggagcccgagaagatcatcggcgccaccgacagctgcggcgacctgatgttcctgatgaagtggaaggacaccgacgaggccgacctggtgctggccaaggaggccaacgtgaagtgcccccagatcgtgatcgccttctacgaggagagactgacctggcacgcctaccccgaggacgccgagaacaaggagaaggagacc

SEQ ID NO: 1086 - DNA, 240 bp, Artificial sequence
  Synthetic
gccctgcccgccaaggacagcgcctggccctgggaggagaagcccagatacctgggccccgtgaccttcgaggacgtggccgtgctgttcaccgaggccgagtggaagagactgagcctggagcagagaaacctgtacaaggaggtgatgctggagaacctgagaaacctggtgagcctggccgagagcaagcccgaggtgcacacctgccccagctgccccctggccttcggcagccag

SEQ ID NO: 1087 - DNA, 240 bp, Artificial sequence
  Synthetic
gacgccaagagcctgaccgcctggagcagaaccctggtgaccttcaaggacgtgttcgtggacttcaccagagaggagtggaagctgctggacaccgcccagcagatcgtgtacagaaacgtgatgctggagaactacaagaacctggtgagcctgggctaccagctgaccaagcccgacgtgatcctgagactggagaagggcgaggagccctggctggtggagagagagatccaccag

SEQ ID NO: 1088 - DNA, 240 bp, Artificial sequence
  Synthetic
gacgccgtggccttcgaggacgtggccgtgaacttcacccaggaggagtgggccctgctgggccccagccagaagaacctgtacagatacgtgatgcaggagaccatcagaaacctggactgcatcagaatgatctgggaggagcagaacaccgaggaccagtacaagaaccccagaagaaacctgagatgccacatggtggagagattcagcgagagcaaggacagcagccagtgcggc

SEQ ID NO: 1089 - DNA, 240 bp, Artificial sequence
  Synthetic
gagaagaccaaggtggagagaatggtggaggactacctggccagcggctaccaggacagcgtgaccttcgacgacgtggccgtggacttcacccccgaggagtgggccctgctggacaccaccgagaagtacctgtacagagatgtgatgctggagaactacatgaacctggccagcgtggagtgggagatccagcccagaaccaagagaagcagcctgcagcagggcttcctgaagaac

SEQ ID NO: 1090 - DNA, 240 bp, Artificial sequence
  Synthetic
gacagcgtggccttcgaggacgtggacgtgaacttcacccaggaggagtgggccctgctggaccccagccagaagaacctgtacagagatgtgatgtgggagaccatgagaaacctggccagcatcggcaagaagtggaaggaccagaacatcaaggaccactacaagcacagaggcagaaacctgagaagccacatgctggagagactgtaccagaccaaggacggcagccagagaggc

SEQ ID NO: 1091 - DNA, 240 bp, Artificial sequence
  Synthetic
atcgagagccaggagcccgtgaccttcgaggacgtggccgtggacttcacccaggaggagtggcagcagctgaaccccgcccagaagaccctgcacagagatgtgatgctggagacctacaaccacctggtgagcgtgggctgcagcggcatcaagcccgacgtgatcttcaagctggagcacggcaaggacccctggatcatcgagagcgagctgagcagatggatctaccccgacaga

SEQ ID NO: 1092 - DNA, 240 bp, Artificial sequence
  Synthetic
gccgtgggcctgtgcaaggccatgagccagggcctggtgaccttcagagatgtggccctggacttcagccaggaggagtgggagtggctgaagcccagccagaaggacctgtacagagatgtgatgctggagaactacagaaacctggtgtggctgggcctgagcatcagcaagcccaacatgatcagcctgctggagcagggcaaggagccctggatggtggagagaaagatgagccag

SEQ ID NO: 1093 - DNA, 240 bp, Artificial sequence
  Synthetic
gacaaggtggaggaggaggccatggcccccggcctgcccaccgcttgcagccaagagcctgtgaccttcgccgacgtggccgtggtgttcacccccgaggagtgggtgttcctggacagcacccagagaagcctgtacagagatgtgatgctggagaactacagaaacctggccagcgtggccgaccagctgtgcaagcccaacgccctgagctacctggaggagagaggcgagcagtgg

SEQ ID NO: 1094 - DNA, 240 bp, Artificial sequence
  Synthetic
accttcgaggacgtggccgtgtacttcagccaggaggagtggggcctgctggacaccgcccagagagccctgtacagacacgtgatgctggagaacttcaccctggtgaccagcctgggcctgagcaccagcagacccagagtggtgatccagctggagagaggcgaggagccctgggtgcccagcggcaaggacatgaccctggccagaaacacctacggcagactgaacagcggcagc

SEQ ID NO: 1095 - DNA, 240 bp, Artificial sequence
  Synthetic
gccgagccccccagactgcccctgaccttcgaggacgtggccatctacttcagcgagcaggagtggcaggacctggaggcctggcagaaggagctgtacaagcacgtgatgagaagcaactacgagaccctggtgagcctggacgacggcctgcccaagcccgagctgatcagctggatcgagcacggcggcgagcccttcagaaagtggagagagagccagaagagcggcaacatcatc

SEQ ID NO: 1096 - DNA, 240 bp, Artificial sequence
  Synthetic
gacagcgtggtgttcgaggacgtggccgtgaacttcacccaggaggagtgggccctgctgggccccagccagaagaagctgtacagagatgtgatgcaggagaccttcgtgaacctggccagcatcggcgagaactgggaggagaagaacatcgaggaccacaagaaccagggcagaaagctgagaagccacatggtggagagactgtgcgagagaaaggagggcagccagttcggcgag

SEQ ID NO: 1097 - DNA, 240 bp, Artificial sequence
  Synthetic
gccgccgccgccctgagagaccccgcccagggctgcgtgaccttcgaagacgtgaccatctacttcagccaggaggagtgggtgctgctggacgaggcccagagactgctgtactgcgacgtgatgctggagaacttcgccctgatcgccagcctgggcctgatcagcttcagaagccacatcgtgagccagctggagatgggcaaggagccctgggtgcccgacagcgtggacatgacc

SEQ ID NO: 1098 - DNA, 240 bp, Artificial sequence
  Synthetic
gccgcccccgccctggccctggtgagcttcgaggacgtggtggtgaccttcaccggcgaggagtggggccacctggacctggcccagagaaccctgtaccaggaggtgatgctggagacctgcagactgctggtgagcctgggccaccccgtgcccaagcccgagctgatctacctgctggagcacggccaggagctgtggaccgtgaagagaggcctgagccagagcacctgcgccggc

SEQ ID NO: 1099 - DNA, 240 bp, Artificial sequence
  Synthetic
atcaagagccaggagagcctgaccctggaggacgtggccgtggagttcacctgggaggagtggcagctgctgggccccgcccagaaggacctgtacagagatgtgatgctggagaactacagcaacctggtgagcgtgggctaccaggccagcaagcccgacgccctgttcaagctggagcagggcgagccctggaccgtggagaacgagatccacagccagatctgccccgagatcaag

SEQ ID NO: 1100 - DNA, 240 bp, Artificial sequence
  Synthetic
ggcgagagcctggagagcagagtgaccctgggcagcctgaccgccgagagccaggagctgctgaccttcaaggacgtgagcgtggacttcacccaggaggagtggggccagctggcccccgcccacagaaacctgtacagagaggtgatgctggagaactacggcaacctggtgagcgtgggctgccagctgagcaagcccggcgtgatcagccagctggagaagggcgaggagccctgg

SEQ ID NO: 1101 - DNA, 240 bp, Artificial sequence
  Synthetic
gccagcgtggccctggaggacgtggccgtgaacttcaccagagaggagtgggccctgctgggcccctgccagaagaacctgtacaaggacgtgatgcaggagaccatcagaaacctggactgcgtgggcatgaagtggaaggaccagaacatcgaggaccagtacagataccccagaaagaacctgagatgcagaatgctggagagattcgtggagagcaaggacggcacccagtgcggc

SEQ ID NO: 1102 - DNA, 240 bp, Artificial sequence
  Synthetic
accgagagccagggcaccgtgaccttcaaggacgtggccatcgacttcacccaggaggagtggaagagactggaccccgcccagagaaagctgtacagaaacgtgatgctggagaactacaacaacctgatcaccgtgggctaccccttcaccaagcccgacgtgatcttcaagctggagcaggaggaggagccctgggtgatggaggaggaggtgctgagaagacactggcagggcgag

SEQ ID NO: 1103 - DNA, 240 bp, Artificial sequence
  Synthetic
gacagcgtggccagcgaggacgtggccgtgaacttcaccctggaggagtgggccctgctggaccccagccagaagaagctgtacagagatgtgatgagagagaccttcagaaacctggcctgcgtgggcaagaagtgggaggaccagagcatcgaggactggtacaagaaccagggcagaatcctgagaaaccacatggaggagggcctgagcgagagcaaggagtacgaccagtgcggc

SEQ ID NO: 1104 - DNA, 240 bp, Artificial sequence
  Synthetic
gaggagacccagggcgagctgaccagcagctgcggcagcaagaccatggccaacgtgagcctggccttcagagatgtgagcatcgacctgagccaggaggagtgggagtgcctggacgccgtgcagagagacctgtacaaggacgtgatgctggagaactacagcaacctggtgagcctgggctacaccatccccaagcccgacgtgatcaccctgctggagcaggagaaggagccctgg

SEQ ID NO: 1105 - DNA, 240 bp, Artificial sequence
  Synthetic
gccgccatcctgctgaccaccagacccaaggtgcccgtgagcttcgaggacgtgagcgtgtacttcaccaagaccgagtggaagctgctggacctgagacagaaggtgctgtacaagagagtgatgctggagaactacagccacctggtgagcctgggcttcagcttcagcaagccccacctgatcagccagctggagagaggcgagggcccctgggtggccgacatccccagaacctgg

SEQ ID NO: 1106 - DNA, 240 bp, Artificial sequence
  Synthetic
aaggacaaggtggagaaggagaagagcgagaaggagaccaccagcaagaagaacagccacaagaagaccagacccagactgaagaacgtggacagaagcagcgcccagcacctggaggtgaccgtgggcgacctgaccgtgatcatcaccgacttcaaggagaagaccaagagcccccccgccagcagcgccgccagcgctgaccaacacagccaaagcggaagcagcagcgacaacacc

SEQ ID NO: 1107 - DNA, 240 bp, Artificial sequence
  Synthetic
ggccccctgaccttcaccgacgtggccatcaagttcagcctggaggagtggcagttcctggacaccgcccagcagaacctgtacagagatgtgatgctggagaactacagaaacctggtgttcctgggcgtgggcgtgagcaagcccgacctgatcacctgcctggagcagggcaaggagccctggaacatgaagagacacaagatggtggccaagccccccgtggtgtgcagccacttc

SEQ ID NO: 1108 - DNA, 240 bp, Artificial sequence
  Synthetic
agaaagcccaacccccaggccatggccgccctgttcctgagcgccccccctcaagccgaagtgaccttcgaggacgtggccgtgtacctgagcagagaggagtggggcagactgggccccgcccagagaggcctgtacagagatgtgatgctggagacctacggcaacctggtgagcctgggcgtgggccccgccggacccaaacctggagtgatcagccagctggagagaggcgacgag

SEQ ID NO: 1109 - DNA, 240 bp, Artificial sequence
  Synthetic
ctgagcctgagccccatcctgctgtacacctgcgagatgttccaggaccccgtggccttcaaggacgtggccgtgaacttcacccaggaggagtgggccctgctggacatcagccagaagaacctgtacagagaggtgatgctggagaccttctggaacctgaccagcatcggcaagaagtggaaggaccagaacatcgagtacgagtaccagaaccccagaagaaacttcagaagcgtg

SEQ ID NO: 1110 - DNA, 240 bp, Artificial sequence
  Synthetic
gccgccggcgagcccagaagcctgctgttcttccagaagcccgtgaccttcgaggacgtggccgtgaacttcacccaggaggagtgggactgcctggacgccagccagagagtgctgtaccaggacgtgatgagcgagaccttcaagaacctgaccagcgtggccagaatcttcctgcacaagcccgagctgatcaccaagctggagcaggaggaggagcagtggagagagaccagagtg

SEQ ID NO: 1111 - DNA, 240 bp, Artificial sequence
  Synthetic
gccgccatgcccctgaaggcccagtaccaggagatggtgaccttcgaggacgtggccgtgcacttcaccaagaccgagtggaccggcctgagccccgcccagagagccctgtacagaagcgtgatgctggagaacttcggcaacctgaccgccctgggctaccccgtgcccaagcccgccctgatcagcctgctggagagaggcgacatggcctggggcctggaggcccaggacgacccc

SEQ ID NO: 1112 - DNA, 240 bp, Artificial sequence
  Synthetic
gccagagtgcccctgaccttcagcgacgtggccatcgacttcagccaggaggagtgggagtacctgaacagcgaccagagagacctgtacagagatgtgatgctggagaactacaccaacctggtgagcctggacttcaacttcaccaccgagagcaacaagctgagcagcgagaagagaaactacgaggtgaacgcctaccaccaggagacctggaagagaaacaagaccttcaacctg

SEQ ID NO: 1113 - DNA, 240 bp, Artificial sequence
  Synthetic
gccagcagactgcccaccgcctggagctgcgagcccgtgaccttcgaggacgtgaccctgggcttcacccccgaggagtggggcctgctggacctgaagcagaagagcctgtacagagaggtgatgctggagaactacagaaacctggtgagcgtggagcaccagctgagcaagcccgacgtggtgagccagctggaggaggccgaggacttctggcccgtggagagaggcatcccccag

SEQ ID NO: 1114 - DNA, 240 bp, Artificial sequence
  Synthetic
agcaagaagaagagagatgccgccgacaagcccagaggcttcgccagaggcctggaccccgagagaatcatcggcgccaccgacagcagcggcgagctgatgttcctgatgaagtggaaggacagcgacgaggccgacctggtgctggccaaggaggccaacatgaagtgcccccagatcgtgatcgccttctacgaggagagactgacctggcacagctgccccgaggacgaggcccag

SEQ ID NO: 1115 - DNA, 240 bp, Artificial sequence
  Synthetic
gcccacaagtacgtgggcctgcagtaccacggcagcgtgaccttcgaggacgtggccatcgccttcagccagcaggagtgggagagcctggacagcagccagagaggcctgtacagagatgtgatgctggagaactacagaaacctggtgagcatgggccacagcagaagcaagccccacgtgatcgccctgctggagcagtggaaggagcccgaggtgaccgtgagaaaggacggcaga

SEQ ID NO: 1116 - DNA, 240 bp, Artificial sequence
  Synthetic
gccgccgccagactgctgcccgtgcccgccggcccccaacctcttagcttccaggccaagctgaccttcgaggacgtggccgtgctgctgagccaggacgagtgggacagactgtgccccgcccagagaggcctgtacagaaacgtgatgatggagacctacggcaacgtggtgagcctgggcctgcccggcagcaagcccgacatcatcagccagctggagagaggcgaggacccctgg

SEQ ID NO: 1117 - DNA, 240 bp, Artificial sequence
  Synthetic
gccgtgggcctgctgaaggccatgtaccaggagctggtgaccttcagagatgtggccgtggacttcagccaggaggagtgggactgcctggacagcagccagagacacctgtacagcaacgtgatgctggagaactacagaatcctggtgagcctgggcctgtgcttcagcaagcccagcgtgatcctgctgctggagcagggcaaggccccctggatggtgaagagagagctgaccaag

SEQ ID NO: 1118 - DNA, 240 bp, Artificial sequence
  Synthetic
ggcctgctgaccttcagagatgtggccatcgagttcagcctggaggagtggcagtgcctggacaccgcccagagaaacctgtacaagaacgtgatcctggagaactacagaaacctggtgttcctgggcatcgccgtgagcaagcaggacctgatcacctgcctggagcaggagaaggagcccctgaccgtgaagagacacgagatggtgaacgagccccccgtgatgtgcagccacttc

SEQ ID NO: 1119 - DNA, 240 bp, Artificial sequence
  Synthetic
ggcctgctggccttcagagatgtggccctggagttcagccccgaggagtgggagtgcctggaccccgcccagagaagcctgtacagagatgtgatgctggagaactacagaaacctgatcagcctgggcgaggacagcttcaacatgcagttcctgttccacagcctggccatgagcaagcccgagctgatcatctgcctggaggccagaaaggagccctggaacgtgaacaccgagaag

SEQ ID NO: 1120 - DNA, 240 bp, Artificial sequence
  Synthetic
aacctgaccgagggcagagtggtgttcgaggacgtggccatctacttcagccaggaggagtggggccacctggacgaggcccagagactgctgtacagagatgtgatgctggagaacctggccctgctgagcagcctgggcagctggcacggcgccgaggacgaagaggcccctagccagcagggcttcagcgtgggcgtgagcgaggtgaccgccagcaagccctgcctgagcagccag

SEQ ID NO: 1121 - DNA, 240 bp, Artificial sequence
  Synthetic
agccagaactacgacctgccccagaagaagcaggagaagatgaccaagttccaggaggccgtgaccttcaaggacgtggccgtggtgttcagcagagaggagctgagactgctggacctgacccagagaaagctgtacagagatgtgatggtggagaacttcaagaacctggtggccgtgggccacctgcccttccagcccgacatggtgagccagctggaggccgaggagaagctgtgg

SEQ ID NO: 1122 - DNA, 240 bp, Artificial sequence
  Synthetic
ggccccgcccagcacaccagctggccctgcggcagcgccgttcctacactgaagagcatggtgaccttcgaggacgtggccgtgtacttcagccaggaggagtgggagctgctggacgccgcccagagacacctgtaccacagcgtgatgctggagaacctggagctggtgaccagcctgggcagctggcacggcgtggagggcgagggagctcaccccaagcagaacgtgagcgtggag

SEQ ID NO: 1123 - DNA, 240 bp, Artificial sequence
  Synthetic
agcggctaccccggcgccgagagaaacctgctggagtacagctacttcgagaagggccccctgaccttcagagatgtggtgatcgagttcagccaggaggagtggcagtgcctggacaccgcccagcaggacctgtacagaaaggtgatgctggagaacttcagaaacctggtgttcctgggcatcgacgtgagcaagcccgacctgatcacctgcctggagcagggcaaggacccctgg

SEQ ID NO: 1124 - DNA, 240 bp, Artificial sequence
  Synthetic
gccagaaagctggtgatgttcagagatgtggccatcgacttcagccaggaggagtgggagtgcctggacagcgcccagagagacctgtacagagatgtgatgctggagaactacagcaacctggtgagcctggacctgcccagcagatgcgccagcaaggacctgagccccgagaagaacacctacgagaccgagctgagccagtgggagatgagcgacagactggagaactgcgacctg

SEQ ID NO: 1125 - DNA, 240 bp, Artificial sequence
  Synthetic
accttcgaggacgtggccgtggagttcagccagtgggagtggggccagctgaaccccgcccagaaggacctgtacagagaggtgatgctggagaacttcagaaacctggccatcctgggcctgctggtgagcaagccctacgtgatctgccagctggaggagggcggcgagcccttcatggtggagagagagatcagcaccggcgcccacagcgactggaagagaagaagcaagagcaag

SEQ ID NO: 1126 - DNA, 240 bp, Artificial sequence
  Synthetic
ggccccctgcagttcagagatgtggccatcgagttcagcctggaggagtggcactgcctggacaccgcccagagaaacctgtacagaaacgtgatgctggagaactacagcaacctggtgttcctgggcatcaccgtgagcaagcccgacctgatcacctgcctggagcagggcagaaagcccctgaccatgaagagaaacgagatgatcgccaagcccagcgtgatgtgcagccacttc

SEQ ID NO: 1127 - DNA, 240 bp, Artificial sequence
  Synthetic
atcaagttccaggagagagtgaccttcaaggacatcgccgtgatcttcaccaaggaggagctggccgtgctggacaaggcccagatcaacctgtaccaggacgtgatgctggagaacttcagaaacttcatcagcgtggacggcatcaagaacaacatcctgaacctgcagggcaagggcctgatctacctgagccaggaggagctgcactgctggaagatctggaagcagagaatcaga

SEQ ID NO: 1128 - DNA, 240 bp, Artificial sequence
  Synthetic
gtggccggctggctgaccaactacagccaggacagcgtgaccttcgaggacgtggccgtggacttcacccaggaggagtggaccctgctggaccagacccagagaaacctgtacagagatgtgatgctggagaactacaagaacctggtggccgtggactgggagagccacatcaacaccaagtggagcgccccccagcagaacttcctgcagggcaagaccagcagcgtggtggagatg

SEQ ID NO: 1129 - DNA, 240 bp, Artificial sequence
  Synthetic
gccgccgcctggatggcccccgcccaggagagcgtgaccttcgaggacgtggccgtgaccttcacccaggaggagtggggccagctggacgtgacccagagagccctgtacgtggaggtgatgctggagacctgcggcctgctggtggccctgggcgacagcaccaagcccgagaccgtggagcccatccccagccacctggccctgcccgaggaagtgagcctgcaggagcagctggcc

SEQ ID NO: 1130 - DNA, 240 bp, Artificial sequence
  Synthetic
gtgctggagtggctgttcatcagccaggagcagcccaagatcaccaagagctggggccccctgagcttcatggacgtgttcgtggacttcacctgggaggagtggcagctgctggaccccgcccagaagtgcctgtacagaagcgtgatgctggagaactacagcaacctggtgagcctgggctaccagcacaccaagcccgacatcatcttcaagctggagcagggcgaggagctgtgc

SEQ ID NO: 1131 - DNA, 240 bp, Artificial sequence
  Synthetic
gccgccgccgtgctgatggacagagtgcagagctgcgtgaccttcgaggacgtgttcgtgtacttcagcagagaggagtgggagctgctggaggaggcccagagattcctgtacagagatgtgatgctggagaacttcgccctggtggccaccctgggcttctggtgcgaggccgagcacgaggctcccagcgagcagagcgtgagcgtggagggcgtgagccaggtgagaaccgccgag

SEQ ID NO: 1132 - DNA, 240 bp, Artificial sequence
  Synthetic
gccggcagccagttccccgacttcaagcacctgggcaccttcctggtgttcgaggagctggtgaccttcgaggacgtgctggtggacttcagccccgaggagctgagcagcctgagcgccgcccagagaaacctgtacagagaggtgatgctggagaactacagaaacctggtgagcctgggccaccagttcagcaagcccgacatcatcagcagactggaggaggaggagagctacgcc

SEQ ID NO: 1133 - DNA, 240 bp, Artificial sequence
  Synthetic
atccagagccagatcagcttcgaggacgtggccgtggacttcaccctggaggagtggcagctgctgaaccccacccagaagaacctgtacagagatgtgatgctggagaactacagcaacctggtgttcctggaggtgtggctggacaaccccaagatgtggctgagagacaaccaggacaacctgaagagcatggagagaggccacaagtacgacgtgttcggcaagatcttcaacagc

SEQ ID NO: 1134 - DNA, 240 bp, Artificial sequence
  Synthetic
gacctggtggccttcgaggacgtggccgtgaacttcacccaggaggagtggagcctgctggaccccagccagaagaacctgtacagagaggtgatgcaggagaccctgagaaacctggccagcatcggcgagaagtggaaggaccagaacatcgaggaccagtacaagaaccccagaaacaacctgagaagcctgctgggcgagagagtggacgagaacaccgaggagaaccactgcggc

SEQ ID NO: 1135 - DNA, 240 bp, Artificial sequence
  Synthetic
aaggacgaggacatcaagctgagagtgatcggccaggacagcagcgagatccacttcaaggtgaagatgaccacccccctgaagaagctgaagaagagctactgccagagacagggcgtgcccgtgaacagcctgagattcctgttcgagggccagagaatcgccgacaaccacacccccgaggagctgggcatggaggaggaggacgtgatcgaggtgtaccaggagcagatcggcggc

SEQ ID NO: 1136 - DNA, 240 bp, Artificial sequence
  Synthetic
gacagcgtggccttcgaggacgtggccgtgaacttcacccaggaggagtgggccctgctgagccccagccagaagaacctgtacagagatgtgaccctggagaccttcagaaacctggccagcgtgggcatccagtggaaggaccaggacatcgagaacctgtaccagaacctgggcatcaagctgagaagcctggtggagagactgtgcggcagaaaggagggcaacgagcacagagag

SEQ ID NO: 1137 - DNA, 240 bp, Artificial sequence
  Synthetic
agaaacttctggatcctgagactgccccccggcagcaagggcgaggcccccaaggtgcccgtgacattcgacgacgtggccgtgtacttcagcgagctggagtggggcaagctggaggactggcagaaggagctgtacaagcacgtgatgagaggcaactacgagaccctggtgagcctggactacgccatcagcaagcccgacatcctgaccagaatcgagagaggcgaggagccctgc

SEQ ID NO: 1138 - DNA, 240 bp, Artificial sequence
  Synthetic
gccgccgccgcccccagaagacccacccagcagggcaccgtgaccttcgaggacgtggccgtgaacttcagccaggaggagtggtgcctgctgagcgaggcccagagatgcctgtacagagatgtgatgctggagaacctggccctgatcagcagcctgggctgctggtgcggcagcaaggacgaggaggccccctgcaagcagagaatcagcgtgcagagagagagccagagcagaacc

SEQ ID NO: 1139 - DNA, 240 bp, Artificial sequence
  Synthetic
agcggcgaggacagcggcagcttctacagctggcagaaggccaagagagagcagggcctggtgaccttcgaggacgtggccgtggacttcacccaggaggagtggcagtacctgaaccccccccagagaaccctgtacagagatgtgatgctggagacctacagcaacctggtgttcgtgggccagcaggtgaccaagcccaacctgatcctgaagctggaggtggaggagtgccccgcc

SEQ ID NO: 1140 - DNA, 240 bp, Artificial sequence
  Synthetic
gacagcgtggccttcgaggacgtggccgtgaacttcacccaggaggagtgggccctgctgggccccagccagaagagcctgtacagaaacgtgatgcaggagaccatcagaaacctggactgcatcgagatgaagtgggaggaccagaacatcggcgaccagtgccagaacgccaagagaaacctgagaagccacacctgcgagatcaaggacgacagccagtgcggcgagaccttcggc

SEQ ID NO: 1141 - DNA, 240 bp, Artificial sequence
  Synthetic
gccgccggctggctgaccacctggagccagaacagcgtgaccttccaggaggtggccgtggacttcagccaggaggagtgggccctgctggaccccgcccagaagaacctgtacaaggacgtgatgctggagaacttcagaaacctggccagcgtgggctaccagctgtgcagacacagcctgatcagcaaggtggaccaggagcagctgaagaccgacgagagaggcatcctgcagggc

SEQ ID NO: 1142 - DNA, 240 bp, Artificial sequence
  Synthetic
gagaaccccagaaaccagctgatggccctgatgctgctgaccgcccagccccaggagctggtgatgttcgaggaggtgagcgtgtgcttcaccagcgaggagtgggcctgcctgggccccatccagagagccctgtactgggacgtgatgctggagaactacggcaacgtgaccagcctggagtgggagaccatgaccgagaacgaggaggtgaccagcaagcccagcagcagccagaga

SEQ ID NO: 1143 - DNA, 240 bp, Artificial sequence
  Synthetic
ctggagacctacaacagcctggtgagcctgcaggagctggtgagcttcgaggaggtggccgtgcacttcacctgggaggagtggcaggacctggacgacgcccagagaaccctgtacagagatgtgatgctggagacctacagcagcctggtgagcctgggccactgcatcaccaagcccgagatgatcttcaagctggagcagggcgccgagccctggatcgtggaggagacccccaac

SEQ ID NO: 1144 - DNA, 240 bp, Artificial sequence
  Synthetic
agacacttcagaagacccgagccctgcagagagcccctggccagccccatccaggacagcgtggccttcgaggacgtggccgtgaacttcacccaggaggagtgggccctgctggacagcagccagaagaacctgtacagagaggtgatgcaggagacctgcagaaacctggccagcgtgggcagccagtggaaggaccagaacatcgaggaccacttcgagaagcccggcaaggacatc

SEQ ID NO: 1145 - DNA, 240 bp, Artificial sequence
  Synthetic
gccgccgccgagctgaccgcccccgcccagggcatcgtgaccttcgaagacgtggccgtgtacttcagctggaaggagtggggcctgctggacgaggcccagaagtgcctgtaccacgacgtgatgctggagaacctgaccctgaccaccagcctgggcggcagcggcgccggagatgaggaggctccttaccagcagagcaccagcccccagagagtgagccaggtgagaatccccaag

SEQ ID NO: 1146 - DNA, 240 bp, Artificial sequence
  Synthetic
gccgccaccttccagctgcccggccaccaggagatgcccctgaccttccaggacgtggccgtgtacttcagccaggccgagggcagacagctgggcccccagcagagagccctgtacagagatgtgatgctggagaactacggcaacgtggccagcctgggcttccccgtgcccaagcccgagctgatcagccagctggagcagggcaaggagctgtgggtgctgaacctgctgggcgcc

SEQ ID NO: 1147 - DNA, 240 bp, Artificial sequence
  Synthetic
agaagcgaggccggcgagccccccagcagcctgcaggtgaagcccgagacacctgccagcgccgctgtggccgtggctgctgctgctgctcccaccaccacagccgagaagccccccgccgaggcccaggacgaacctgccgagagcctgagcgagttcaagcccttcttcggcaacatcatcatcaccgacgtgaccgccaactgcctgaccgtgaccttcaaggagtacgtgaccgtg

SEQ ID NO: 1148 - DNA, 240 bp, Artificial sequence
  Synthetic
cacagaaccaccagaatcaagatcaccgagctgaacccccacctgatgtgcgccctgtgcggcggctacttcatcgacgccaccaccatcgtggagtgcctgcacagcttctgcaagacctgcatcgtgagatacctggagaccaacaagtactgccccatgtgcgacgtgcaggtgcacaagaccagacccctgctgagcatcagaagcgacaagaccctgcaggacatcgtgtacaag

SEQ ID NO: 1149 - DNA, 240 bp, Artificial sequence
  Synthetic
gccagccaggagttcgaggtggaggccatcgtggacaagagacaggacaagaacggcaacacccagtacctggtgagatggaagggctacgacaagcaggacgacacctgggagcccgagcagcacctgatgaactgcgagaagtgcgtgcacgacttcaacagaagacagaccgagaagcagaagaagctgacctggaccaccaccagcagaatcttcagcaacaacgccagaagaaga

SEQ ID NO: 1150 - DNA, 240 bp, Artificial sequence
  Synthetic
gccagcggcgacctgtacgaggtggagagaatcgtggacaagagaaagaacaagaagggcaagtgggagtacctgatcagatggaagggctacggcagcaccgaggacacctgggagcccgagcaccacctgctgcactgcgaggagttcatcgacgagttcaacggcctgcacatgagcaaggacaagagaatcaagagcggcaagcagagcagcaccagcaagctgctgagagacagc

SEQ ID NO: 1151 - DNA, 240 bp, Artificial sequence
  Synthetic
cccagaggcaagcacgccttccagaccggctggctgaacgacctggtgaccaaggagagcatgaccttcaaggacgtggccgtggacatcacccaggaggactgggagctgatgagacccgtgcagaaggagctgtacaagaccgtgaccctgcagaactactggaacatggtgagcctgggcctgaccgtgtacagacccaccgtgatccccatcctggaggagccctggatggtgatc

SEQ ID NO: 1152 - DNA, 240 bp, Artificial sequence
  Synthetic
accctgatcagaaaggccgacctggagaaccacaacaaggacggcggcttctggaccgtgatcgacggcaaggtgtacgacatcaaggacttccagacccagagcctgaccggcaacagcatcctggcccagttcgccggcgaggaccccgtggtggccctggaagctgctctgcagttcgaggacaccagagagagcatgcacgccttctgcgtgggccagtacctggagcccgaccag

SEQ ID NO: 1153 - DNA, 240 bp, Artificial sequence
  Synthetic
gagaagaccaagatcggcaccatggtggaggaccacagaagcaacagctaccaggacagcgtgaccttcgacgacgtggccgtggagttcacccccgaggagtgggccctgctggacaccacccagaagtacctgtacagagatgtgatgctggagaactacatgaacctggccagcgtggacttcttcttctgcctgaccagcgagtgggagatccagcccagaaccaagagaagcagc

SEQ ID NO: 1154 - DNA, 240 bp, Artificial sequence
  Synthetic
gcccacgagctggtgatgttcagagatgtggccatcgacgtgagccaggaggagtgggagtgcctgaaccccgcccagagaaacctgtacaaggaggtgatgctggagaactacagcaacctggtgagcctgggcctgagcgtgagcaagcccgccgtgatcagcagcctggagcagggcaaggagccctggatggtggtgagagaggagaccggcagatggtgccccggcacctggaag

SEQ ID NO: 1155 - DNA, 240 bp, Artificial sequence
  Synthetic
gccttcgaggacgtggccgtgtacttcagccaggaggagtggggcctgctggacaccgcccagagagccctgtacagaagagtgatgctggacaacttcgccctggtggccagcctgggcctgagcaccagcagacccagagtggtgatccagctggagagaggcgaggagccctgggtgcccagcggcaccgacaccaccctgagcagaaccacctacagaagaagaaaccccggcagc

SEQ ID NO: 1156 - DNA, 240 bp, Artificial sequence
  Synthetic
gcccagctgagaagaggccacctgaccttcagagatgtggccatcgagttcagccaggaggagtggaagtgcctggaccccgtgcagaaggccctgtacagagatgtgatgctggagaactacagaaacctggtgagcctgggcatctgcctgcccgacctgagcatcatcagcatgatgaagcagagaaccgagccctggaccgtggagaacgagatgaaggtggccaagaaccccgac

SEQ ID NO: 1157 - DNA, 240 bp, Artificial sequence
  Synthetic
agcgaccacagcctgggcatcagcagaagcaagacccccgtggacgaccccatgagcctgctgtacaacatgaacgactgctacagcaagctgaaggagctggtgcccagcatcccccagaacaagaaggtgagcaagatggagatcctgcagcacgtgatcgactacatcctggacctgcagatcgccctggacagccaccccaccatcgtgagcctgcaccaccagagacccggccag

SEQ ID NO: 1158 - DNA, 240 bp, Artificial sequence
  Synthetic
aaggaccccaacgagccccagaagcccgtgagcgcctacgccctgttcttcagagacacccaggccgccatcaagggccagaaccccaacgccaccttcggcgaggtgagcaagatcgtggccagcatgtgggacggcctgggcgaggagcagaagcaggtgtacaagaagaagaccgaggccgccaagaaggagtacctgaagcagctggccgcctacagagccagcctggtgagcaag

SEQ ID NO: 1159 - DNA, 240 bp, Artificial sequence
  Synthetic
caggaggagaagcaggaggacgccgccatctgccccgtgaccgtgctgcccgaggagcctgtgaccttccaggacgtggccgtggacttcagcagagaggagtggggcctgctgggccccacccagagaaccgagtacagagatgtgatgctggagaccttcggccacctggtgagcgtgggctgggagaccaccctggagaacaaggagctggcccccaacagcgacatccccgaggag

SEQ ID NO: 1160 - DNA, 240 bp, Artificial sequence
  Synthetic
aagagcaccaaggactggaagatggcccccaagctgatctggcccgagagccagagcctgctgaccttcgaggacatggccgtgtacttcagcgaggaggagtggcagctgctgggccccctggagaagaccctgtacaacgacgtgatgcaggacatctacgagaccgccatcagcctgggcaagcagagaaccggcaagatcatgggcatcgagatggccagcagcttcagcaaggag

SEQ ID NO: 1161 - DNA, 240 bp, Artificial sequence
  Synthetic
gacgccagcagactgagcggcagagaccccagcagctggaccgtggaggacgtgatgcagttcgtgagagaggccgacccccagctgggcccccacgccgacctgttcagaaagcacgagatcgacggcaaggccctgctgctgctgagaagcgacatgatgatgaagtacatgggcctgaagctgggccccgccctgaagctgagctaccacatcgacagactgaagcagggcaagttc

SEQ ID NO: 1162 - DNA, 240 bp, Artificial sequence
  Synthetic
gcctactgcctgaccaactgctaccagtacagcgtgaccttcgaggacaccgccgtggacttcacccaggaggagtggatcctgctggaccccgtgcagagaaacctgtacagagatgtgatgctggagaactacgagaacgtggccaaggtgggcttccagctgttcaagcccagcgtgatcagctggctggaggaggaggagctgagaaccctgcagcagggcgtgctgcaggactgg

SEQ ID NO: 1163 - DNA, 240 bp, Artificial sequence
  Synthetic
gccagaagacccagaagcagaaaccccagcgcctggaccgtggaggacgtggtgtggttcgtgaaggacgccgacccccaggccctgggcccccacgtggagctgttcagaaagcacgagatcgacggcaacgccctgctgctgctgaagagcgacatggtgatgaagtacctgggcctgaagctgggccccgccctgaagctgtgctaccacatcgacaagctgaagcaggccaagttc

SEQ ID NO: 1164 - DNA, 240 bp, Artificial sequence
  Synthetic
gccgtgaccttcgaggacgtgaccatcatcttcacctgggaggagtggaagttcctggacagcagccagaagagactgtacagagaggtgatgtgggagaactacaccaacgtgatgagcgtggagaactggaacgagagctacaagagccaggaggagaagttcagatacctggagtacgagaacttcagctactggcagggctggtggaacgccggcgcccagatgtacgagaaccag

SEQ ID NO: 1165 - DNA, 240 bp, Artificial sequence
  Synthetic
gagctgagcgccatcggcgagcaggtgttcgccgtggagagcatcagaaagaagagagtgagaaagggcaaggtggagtacctggtgaagtggaagggctggccccccaagtacagcacctgggagcccgaggagcacatcctggaccccagactggtgatggcctacgaggagaaggaggagagagacagagccagcggctacagaaagagaggccccaagcccaagagactgctgctg

SEQ ID NO: 1166 - DNA, 240 bp, Artificial sequence
  Synthetic
ggcggcgccggcgccagactgcccgccctgctggacgagcagcaggttaacgtgctgctgtacgacatgaacggctgctacagcagactgaaggagctggtgcccaccctgccccagaacagaaaggtgagcaaggtggagatcctgcagcacgtgatcgactacatcagagacctgcagctggagctgaacagcgagagcgaggtgggcacccccggcggcagaggcctgcctgtgaga

SEQ ID NO: 1167 - DNA, 240 bp, Artificial sequence
  Synthetic
gtggtgatggccgccagccccggcagcctgcacagcccccagcagcttgctgaggaagccaccagaaagagagagctgagactgatgaagaacagagaggccgccaaggagtgcagaagaagaaagaaggagtacgtgaagtgcctggagagcagagtggccgtgctggaggtgcagaacaagaagctgatcgaggagctggagaccctgaaggacatctgcagccccaagaccgactac

SEQ ID NO: 1168 - DNA, 240 bp, Artificial sequence
  Synthetic
agcctgctgggcagacccaagagaaagagagtgatcacctacgcccagagacaggccgccaacatcagagagagaaagagaatgttcaacctgaacgaggccttcgaccagctgagaagaaaggtgcccaccttcgcctacgagaagagactgagcagaatcgagaccctgagactggccatcgtgtacatcagcttcatgaccgagctgctggagagctgcgagaagaaggagagcggc

SEQ ID NO: 1169 - DNA, 240 bp, Artificial sequence
  Synthetic
ggcggcggccccggcggcagacccggcagagagcccagacaaagacacaccgccaacgccagagagagagacagaaccaacagcgtgaacaccgccttcaccgccctgagaaccctgatccccaccgagcccgccgacagaaagctgagcaagatcgagaccctgagactggccagcagctacatcagccacctgggcaacgtgctgctggccggcgaggcctgcggcgatggacagccc

SEQ ID NO: 1170 - DNA, 240 bp, Artificial sequence
  Synthetic
agcggcttcggctacagcctgccccagcagcagcccgccgccgtggctagaagaaacgagagagagagaaacagagtgaagctggtgaacctgggcttcgccaccctgagagagcacgtgcccaacggcgccgccaacaagaagatgagcaaggtggagaccctgagaagcgccgtggagtacatcagagccctgcagcagctgctggacgagcacgacgccgtgagcgccgccttccag

SEQ ID NO: 1171 - DNA, 240 bp, Artificial sequence
  Synthetic
gcccccctgccccccagagaccccaacggcgccggccctgaatggagagagcccggagccgtgagcttcgccgacgtggccgtgtacttctgcagagaggagtggggctgcctgagacccgcccagagagccctgtacagagatgtgatgagagagacctacggccacctgagcgccctgggcatcggcggcaacaagcccgccctgatcagctgggtggaggaggaggccgagctgtgg

SEQ ID NO: 1172 - DNA, 240 bp, Artificial sequence
  Synthetic
aagcagggcttcagcaaggaccccagcacctggagcgtggacgaggtgatccagttcatgaagcacaccgacccccagatcagcggccccctggccgacctgttcagacagcacgagatcgacggcaaggccctgttcctgctgaagagcgacgtgatgatgaagtacatgggcctgaagctgggccccgccctgaagctgtgctactacatcgagaagctgaaggagggcaagtacagc

SEQ ID NO: 1173 - DNA, 240 bp, Artificial sequence
  Synthetic
ggcgccttcggcgtgtacgagtaccccttcgagcccgccttcatccagaagagaaacgagagagagagacagagagtgaagtgcgtgaacgagggctacgccagactgagaggccacctgcccggcgccctggccgagaagagactgagcaaggtggagaccctgagagccgccatcagatacatcaagtacctgcaggagctgctgagcagcgcccccgacggcagcaccccccctgct

SEQ ID NO: 1174 - DNA, 240 bp, Artificial sequence
  Synthetic
agcggcggcggcagcccccagagctacgaggagctgcagacccagagagtgatggccaacgtgagagagagacagagaacccagagcctgaacgaggccttcgccgccctgagaaagatcatccccaccctgcccagcgacaagctgagcaagatccagaccctgaagctggccgccagatacatcgacttcctgtaccaggtgctgcagagcgacgagctggacagcaagatggccagc

SEQ ID NO: 1175 - DNA, 240 bp, Artificial sequence
  Synthetic
ttcgtgcagcacagatgcgaccccgccagagagaagcccctgaagtgccccgactgcgagaagagattcaagtacgccagcgacctgcagagacacagaagagtgcacaccggcgagaagccctacaagtgccccaactgcgacaaggccttcaagcagagagagcacctgaacaagcaccagggcgtgcacgccagagagcagcagttcaagtgcgtgtggtgcggcgagagattcctg

SEQ ID NO: 1176 - DNA, 240 bp, Artificial sequence
  Synthetic
aacctgaccgaggactgcatggtgttcgaggacgtggccatctacttcagccaggaggagtggggcatcctgaacgacgcccagagacacctgcacagcaacgtgatgctggagaacttcgccctgctgagcagcgtgggctgctggcacggcgccaaggacgaggaggtgcccagcaagcagtgcgtgagcgtgagagtgctgcaggtgaccatccccaagcccgccctgagcaccctg

SEQ ID NO: 1177 - DNA, 240 bp, Artificial sequence
  Synthetic
aacaagaagctggaggccgtgggcaccggcatcgagcccaaggccatgagccagggcctggtgaccttcggcgacgtggccgtggacttcagccaggaggagtgggagtggctgaaccccatccagagaaacctgtacagaaaggtgatgctggagaactacagaaacctggccagcctgggcctgtgcgtgagcaagcccgacgtgatcagcagcctggagcagggcaaggagccctgg

SEQ ID NO: 1178 - DNA, 240 bp, Artificial sequence
  Synthetic
gccgaggagttcgtgaccctgaaggacgtgggcatggacttcaccctgggcgactgggagcagctgggcctggagcagggcgacaccttctgggacaccgccctggacaactgccaggacctgttcctgctggacccccccagacccaacctgaccagccaccccgacggcagcgaggacctggagcccctggctggaggaagccctgaggccaccagccccgacgtgaccgagaccaag

SEQ ID NO: 1179 - DNA, 240 bp, Artificial sequence
  Synthetic
gacagcctgagcggcagcagcctgtacagcaccagcgccaacctgcccgtgatgggccacgagaagttccccagcgacctggacctggacatgttcaacggcagcctggagtgcgacatggagagcatcatcagaagcgagctgatggacgccgacggcctggacttcaacttcgacagcctgatcagcacccagaacgtggtgggcctgaacgtgggcaacttcaccggcgccaagcag

SEQ ID NO: 1180 - DNA, 240 bp, Artificial sequence
  Synthetic
ggcggctacagcagcgtgagcagctgcaacggctacggcagaatgggcctgctgcaccaggagaagctgcccagcgacctggacggcatgttcatcgagagactggactgcgacatggagagcatcatcagaaacgacctgatggacggcgacaccctggacttcaacttcgacaacgtgctgcccaaccagagcttcccccacagcgtgaagaccaccacccacagctgggtgagcggc

SEQ ID NO: 1181 - DNA, 240 bp, Artificial sequence
  Synthetic
ttctacatccccgtgcagatccccggctaccagtacgtgagccccgagggcaactgcatcgagcacgtgcagcccaccagcgccttcatccagcagcccttcatcgacgaggaccccgacaaggagaagaagatcaaggagctggagatgctgctgatgagcgccgagaacgaggtgagaagaaagagaatccccagccagcccggcagcttcagcagctggagcggcagcttcctgatg

SEQ ID NO: 1182 - DNA, 240 bp, Artificial sequence
  Synthetic
gaggcccagaacgtgagcagccacgtgccctaccccgtggccctgcacgtgaacatcgtgaacgtgccccagcccgccgccgccgccatccagagacactacaacgacgaggaccccgagaaggagaagagaatcaaggagctggagctgctgctgatgagcaccgagaacgagctgaagggccagcaggtgctgcccacccagaaccacacctgcagctaccccggctggcacagcacc

SEQ ID NO: 1183 - DNA, 240 bp, Artificial sequence
  Synthetic
cccttcggcagcagccccgacgacctgctgtgcccccaccccgctgctgaaagccccagcgacgagggcgctctgctggaccagctgtacctggccctgagaaacttcgacggcctggaggagatcgacagagccctgggcatccccgagctggtgagccagagccaggccgtggaccccgagcagttcagcagccaggacagcaacatcatgctggagcagaaggcccccgtgttcccc

SEQ ID NO: 1184 - DNA, 240 bp, Artificial sequence
  Synthetic
agccagcccggcgccctgatccccggcgacccccaggctatgagccaacctaacagaggccccagccccttcagccccgtgcagctgcaccagctgagagcccagatcctggcctacaagatgctggccagaggccagcccctgcccgagaccctgcagctggccgtgcaaggcaagagaaccctgcccggcctgcagcagcagcagcagcagcagcagcagcagcagcagcagcagcag

SEQ ID NO: 1185 - DNA, 240 bp, Artificial sequence
  Synthetic
cccagacccgagctgcccctgcccgagggctgggaggaggccagagacttcgacggcaaggtgtactacatcgaccacaccaacagaaccaccagctggatcgaccccagagacagatacaccaagcccctgaccttcgccgactgcatcagcgacgagctgcccctgggctgggaggaggcctacgacccccaggtgggagactacttcatcgaccacaacaccaagaccacccagatc

SEQ ID NO: 1186 - DNA, 240 bp, Artificial sequence
  Synthetic
ctgagaaacagcctggacgacctggtgggcccccccagcaacctggagggccagagcgacgagagagccctgctggaccagctgcacaccctgctgagcaacaccgacgccaccggcctggaggagatcgacagagccctgggcatccccgagctggtgaaccagggccaggccctggagcccaagcaggacgccttccagggccaggaggctgccgtgatgatggaccagaaggccggc

SEQ ID NO: 1187 - DNA, 240 bp, Artificial sequence
  Synthetic
ctggacgccctgcccggcccctacgccgctgctgctgctggacctcttggagctgcccctgacagattccccgccgacctggacctggacatgttcagcggcagcctggagtgcgacgtggagagcatcatcctgaacgacttcatggacagcgacgagatggacttcaacttcgacagcgccctgccccccccccctcctggacttgctggagctcctcctcccaaccagagctgggtg

SEQ ID NO: 1188 - DNA, 240 bp, Artificial sequence
  Synthetic
gccagcatgccccccacccccgaggcccagggccccatcctgttcgaggaccttgctgtgtacttcagccaggaggagtgcgtgaccctgcaccccgcccagagaagcctgagcaaggacggcaccaaggagagcctggaggacgccgccctgatgggcgaggagggcaagcccgagatcaaccagcagctgagcctggagagcatggagctggacgagctggccctggagaagtacccc

SEQ ID NO: 1189 - DNA, 240 bp, Artificial sequence
  Synthetic
ggcagccccagctacggcagccccgaggacaccgacagcttctggaaccccaacgccttcgagaccgacagcgacctgcccgccggctggatgagagtgcaggacaccagcggcacctactactggcacatccccaccggcaccacccagtgggagccccccggaagagctagccctagccagggcagcagcccccaggaggagagccagctgacctggaccggcttcgcccacggcgag

SEQ ID NO: 1190 - DNA, 240 bp, Artificial sequence
  Synthetic
gagtgcagcgaggccggcctgctgcaggagggcgtgcagcccgaggagttcgtggctatcgccgactacgccgccaccgacgagacccagctgagcttcctgagaggcgagaagatcctgatcctgagacagaccaccgccgactggtggtggggcgagagagccggctgctgcggctacatccccgccaaccacgtgggcaagcacgtggacgagtacgaccccgaggacacctggcag

SEQ ID NO: 1191 - DNA, 240 bp, Artificial sequence
  Synthetic
aactacagcttcctgcccctggtgcacaacatcatcaagtgcatggacaaggacagccccgaggtgcaccaggacctgaacgccctgaagagcaagttccaggagatgagaaagctgatcagcaccatgcccggcatccacctgagccccgagcagcagcagcagcagctgcagagcctgagagagcaggtgagaaccaagaacgagctgctgcagaagtacaagagcctgtgcatgttc

SEQ ID NO: 1192 - DNA, 240 bp, Artificial sequence
  Synthetic
gccggcgaggacagcaagagcgagaacggcgagaacgcccccatctactgcatctgcagaaagcccgacatcaactgcttcatgatcggctgcgacaactgcaacgagtggttccacggcgactgcatcagaatcaccgagaagatggccaaggccatcagagagtggtactgcagagagtgcagagagaaggaccccaagctggagatcagatacagacacaagaagagcagagagaga

SEQ ID NO: 1193 - DNA, 240 bp, Artificial sequence
  Synthetic
ggccccaacatcatcctgaccggcgacagcagccccggcttcagcaaggagatcgccgccgccctggctggcgtgcctggattcgaggtgagcgctgctggactggagctgggcctgggcctggaggacgagctgagaatggagcccctgggcctggagggcctgaacatgctgagcgacccctgcgccctgctgcccgaccccgctgtggaggagagcttcagaagcgacagactgcag

SEQ ID NO: 1194 - DNA, 240 bp, Artificial sequence
  Synthetic
gaggcctgcaacagccacgcctgccagtgggacggcggcgactgcagcctgaccatggagaacccctgggccaactgcagcagccccctgccctgctgggactacatcaacaaccagtgcgacgagctgtgcaacaccgtggagtgcctgttcgacaacttcgagtgccagggcaacagcaagacctgcaagtacgacaagtactgcgccgaccacttcaaggacaaccactgcgaccag

SEQ ID NO: 1195 - DNA, 240 bp, Artificial sequence
  Synthetic
agcggcggcgaggaggccaacctgctgctgcccgagctgggcagcgctttctacgacatggccagcggcttcaccgtgggcaccctgagcgagaccagcaccggcggacccgctacccccacatggaaggagtgccccatctgcaaggagagattccccgccgagagcgacaaggacgccctggaggaccacatggacggccacttcttcttcagcacccaggaccccttcaccttcgag

SEQ ID NO: 1196 - DNA, 240 bp, Artificial sequence
  Synthetic
agacacggccacagcagcagcgaccccgtgtacccctgcggcatctgcaccaacgaggtgaacgacgaccaggacgccatcctgtgcgaggccagctgccagaagtggttccacagaatctgcaccggcatgaccgagaccgcctacggcctgctgaccgccgaggccagcgctgtgtggggatgcgacacctgcatggccgacaaggacgtgcagctgatgagaaccagagagaccttc

SEQ ID NO: 1197 - DNA, 240 bp, Artificial sequence
  Synthetic
ctggtgggcagcagcctggagggcgccgtgaccccccagacaagcgcttggctgccccctaccagcgctgagcacgaccacagcctgagctgcgtggtgaccccccaggacggcgagaccagcgcccagatgatcgaggagaacctgaactgcctgggccacctgagcaccatcatccacgaggccaacgaggagcagggcaacagcatgatgaacctggactggagctggctgaccgag

SEQ ID NO: 1198 - DNA, 240 bp, Artificial sequence
  Synthetic
gacctggccccccccagaaaggccctgttcacctaccccaagggcgccggcgagatgctggaggacggcagcgagagattcctgtgcgagagcgtgttcagctaccaggtggccagcaccctgaagcaggtgaagcacgaccagcaggtggccagaatggagaagctggccggcctggtggaggagctggaggccgacgagtggagattcaagcccatcgagcagctgctgggcttcacc

SEQ ID NO: 1199 - DNA, 240 bp, Artificial sequence
  Synthetic
gccatgcagcacttcagccagagattcctgtaccagagcagcagcgccagcaccgaccacgaccccctgggcccccttcctcctggatgggagaagagacaggacaacggcagagtgtactacgtgaaccacaacaccagaaccacccagtgggaggaccccagaacccagggcatgatccaggagcccgccctgccccccggatgggagatgaagtacaccagcgagggcgtgagatac

SEQ ID NO: 1200 - DNA, 240 bp, Artificial sequence
  Synthetic
aacagccagaacagcttcctggtgcaggaggtgatggaggaggagtggaacgccctgcagagcgtggagaactgccccgaggacctggcccagctggaggagctgatcgacatggccgtgctggaggagatccagcaggagctgatcaaccaggagcagagcatcatcagcgagtacgagaagagcctgcagttcgacgagaagtgcctgagcatcatgctggccgagtgggaggccaac

SEQ ID NO: 1201 - DNA, 240 bp, Artificial sequence
  Synthetic
aagagcgacaagcagatcaagaacggcgagtgcgacaaggcctacctggacgagctggtggagctgcacagaagactgatgaccctgagagagagacacatcctgcagcagatcgtgaacctgatcgaggagaccggccacttccacatcaccaacaccaccttcgacttcgacctgtgcagcctggacaagaccaccgtgagaaagctgcagagctacctggagaccagcggcaccagc

SEQ ID NO: 1202 - DNA, 240 bp, Artificial sequence
  Synthetic
ctggagtacagcctgctgggcgagcactgggactacgacgccctgttcgagacccagcccggcctggtgaccatcaagaacctggccgtggacttcagacagcagctgcaccccgcccagaagaacttctgcaagaacggcatctgggagaacaacagcgacctgggcagcgccggccactgcgtggccaagcccgacctggttagcctgctggagcaggagaaggagccctggatggtg

SEQ ID NO: 1203 - DNA, 240 bp, Artificial sequence
  Synthetic
gccatgcagcagttcaaccagagatacctgtacagcgccagcatgctggccgccgagaacgacccctacggccccctgcctcctggctgggagaagagagtggacagcaccgacagagtgtacttcgtgaaccacaacaccaagaccacccagtgggaggaccccagaacccagggcctgcagaacgaggagcccctgcccgagggctgggagatcagatacaccagagagggcgtgaga

SEQ ID NO: 1204 - DNA, 240 bp, Artificial sequence
  Synthetic
gagtacggcctgaccgacaacgtggagagaatcgtggagaacgagaagatcaacgccgagaagagcagcaagcagaaggtggacctgcagagcctgcccaccagagcctacctggaccagaccgtggtgcccatcctgctgcagggcctggccgtgctggccaaggagagaccccccaaccccatcgagttcctggccagctacctgctgaagaacaaggcccagttcgaggacagaaac

SEQ ID NO: 1205 - DNA, 240 bp, Artificial sequence
  Synthetic
cacatgaactgggacgacctgctggcctggagagtggacccccccttcagaccctgcctgcagagcgaggaggacgtgagccagttcgacaccagattcaccagacagacccccgtggacagccccgacgacaccgccctgagcgagagcgccaaccaggccttcctgggcttcacctacgtggcccccagcgtgctggacagcatcaaggagggcttcagcttccagcccaagctgaga

SEQ ID NO: 1206 - DNA, 240 bp, Artificial sequence
  Synthetic
agcggcccccagcccccccccggcctggtttacccttgcggagcttgcagaagcgaggtgaacgacgaccaggacgccatcctgtgcgaggccagctgccagaagtggttccacagagagtgcaccggcatgaccgagagcgcctacggcctgctgaccaccgaggccagcgccgtgtgggcttgcgacctgtgcctgaagaccaaggagatccagagcgtgtacatcagagagggcatg

SEQ ID NO: 1207 - DNA, 240 bp, Artificial sequence
  Synthetic
gtggaggtgcaggagcactacgacagcttcttcgaggaggtgttcaccgagctgcaggagaagtacggcgagatcgaggagatgaacgtgtgcgacaacctgggcgaccacctggtgggcaacgtgtacgtgaagttcagaagagaggaggacggcgagagagccgtggccgagctgagcaacagatggttcaacggccaggccgtgcacggcgagctgagccccgtgaccgacttcaga

SEQ ID NO: 1208 - DNA, 240 bp, Artificial sequence
  Synthetic
agcggcctgatcatccccctgaccatcagcggcggcagcggccccagacccctgaaccccgtgacccaagctcctctgccccccggatgggagcagagagtggaccagcacggcagagtgtactacgtggaccacgtggagaagagaaccacctgggacagacccgagcccctgccccccggctgggagagaagagtggacaacatgggcagaatctactacgtggaccacttcaccaga

SEQ ID NO: 1209 - DNA, 240 bp, Artificial sequence
  Synthetic
agcaagcccgagaagatcctgaagaagggcacctacgacaaggcctacaccgacgagctggtggagctgcacagaagactgatggccctgagagagagaaacgtgctgcagcagatcgtgaacctgatcgaggagaccggccacttcaacgtgaccaacaccaccttcgacttcgacctgttcagcctggacgagaccaccgtgagaaagctgcagagctgcctggaggccgtggccacc

SEQ ID NO: 1210 - DNA, 240 bp, Artificial sequence
  Synthetic
agccagaccgtgcccgagcccgaccagggccccgtgagccagcctgttcctgagcctgacctgccctgcgacctgagacacctgaacaccgagcccatggagatcttcagaaactgcgtgaagatcgaggagatcatgcccaacggcgaccccctgctggccggccagaacaccgtggacgaggtgtacgtgagcagacccagccacttctacaccgacggccccctgatgcccagcgac

SEQ ID NO: 1211 - DNA, 240 bp, Artificial sequence
  Synthetic
ctgtgccacatcctggactacagcttcggcggcggcgccggcagagacatccccccccctctgatcgaggaggcttgcgagctgcccgagtgccaggaggacgccggcaacaaggtgtgcagcctgcagtgcaacaaccacgcctgcggctgggacggcggcgactgcagcctgaacttcaacgacccctggaagaactgcacccagagcctgcagtgctggaagtacttcagcgacggc

SEQ ID NO: 1212 - DNA, 240 bp, Artificial sequence
  Synthetic
aactgcggcagcctgcccaacaccatcctgcccgaggacagcagcaccagcctgttcaaggacctgaacagcgccctggccggcctgcccgaggtgagcctgaacgtggacacccccttccccctggaggaggagctgcagatcgagcccctgagcctggacggcctgaacatgctgagcgacagcagcatgggcctgctggaccccagcgtggaggagaccttcagagccgacagactg

SEQ ID NO: 1213 - DNA, 240 bp, Artificial sequence
  Synthetic
cacgccagcggcatcggcagagtggccgccaccagcctgggcaacctgaccaaccacggcagcgaggacctgcccctgccccccggatggagcgtggactggaccatgagaggcagaaagtactacatcgaccacaacaccaacaccacccactggagccaccccctggagagagagggcctgccccccggatgggagagagtggagagcagcgagttcggcacctactacgtggaccac

SEQ ID NO: 1214 - DNA, 240 bp, Artificial sequence
  Synthetic
cccctgagcctgggcgaggacttctacagagaggccatcgagcactgcagaagctacaacgccagactgtgcgccgagagaagcctgagactgcccttcctggacagccagaccggcgtggcccagaacaactgctacatctggatggagaagacccacagaggccccggcctggcccccggccagatctacacctaccccgctagatgctggagaaagaagagaagactgaacatcctg

SEQ ID NO: 1215 - DNA, 240 bp, Artificial sequence
  Synthetic
aaggagaacctgctggccggccccagcgagaacgaccccaacctgttcgtggccctgtacgacttcgtggccagcggcgacaacaccctgagcatcaccaagggcgagaagctgagagtgctgggctacaaccacaacggcgagtggtgcgaggcccagaccaagaacggccagggctgggtgcccagcaactacatcacccccgtgaacagcctggagaagcacagctggtaccacggc

SEQ ID NO: 1216 - DNA, 240 bp, Artificial sequence
  Synthetic
tactacgacctgatcagcggcgccagccagtgggagaagcccgagggcttccagggcgacctgaagaagaccgccgtgaagaccgtgtgggtggagggcctgagcgaggacggcttcacctactactacaacaccgagaccggcgagagcagatgggagaagcccgacgacttcatcccccacaccagcgacctgcccagcagcaaggtgaacgagaacagcctgggcaccctggacgag

SEQ ID NO: 1217 - DNA, 240 bp, Artificial sequence
  Synthetic
cccgagcccgccgccgcccccgtgagcaccagcgagctgaagaaggtggtggctctgtacgactacatgcccatgaacgccaacgacctgcagctgagaaagggcgacgagtacttcatcctggaggagagcaacctgccctggtggagagccagagacaagaacggccaggagggctacatccccagcaactacgtgaccgaggccgaggacagcatcgagatgtacgagtggtacagc

SEQ ID NO: 1218 - DNA, 240 bp, Artificial sequence
  Synthetic
atgtacaccaagaagaacgtgcccagcaagagcaaggccgccgccagcgccaccagagagtggaccgagcaggagaccctgctgctgctggaggccctggagatgtacaaggacgactggaacaaggtgagcgagcacgtgggcagcagaacccaggacgagtgcatcctgcacttcctgagactgcccatcgaggacccctacctggaggacagcgaggccagcctgggccccctggcc

SEQ ID NO: 1219 - DNA, 240 bp, Artificial sequence
  Synthetic
ggcgccgtgaacggcgccgtgggcaccaccttccagccccagaaccccctgctgggcagagcctgcgagagctgctacgccacccagagccaccagtggtacagctggggcccccccaacatgcagtgcagactgtgcgccatctgctggctgtactggaagaagtacggcggcctgaagatgcccacccagagcgaggaggagaagctgagccccagccccaccaccgaggaccccaga

SEQ ID NO: 1220 - DNA, 240 bp, Artificial sequence
  Synthetic
ggcgccgccggcagccccgcccagcagcacgcccacctgagacaacaaagctacgacgtgaccgacgagctgcccctgccccccggctgggagatgaccttcaccgccaccggacagagatacttcctgaaccacatcgagaagatcaccacctggcaggaccccagaaaggccatgaaccagcccctgaaccacatgaacctgcaccccgccgtgagcagcacccccgtgccccagaga

SEQ ID NO: 1221 - DNA, 240 bp, Artificial sequence
  Synthetic
accgtgacctacctgggcaagttcgccttcgacagccccagcaactggtgccaggacaacatcatcagcctgatgagcgccggcatcctgggcgtgccccccgctagcggagctctgagcacacagaccagcaccgccagcatggtgcagcccccccagggcgacgtggaggccatgtaccccgcccttcctccctacagcaactgcggcgacctgtacagcgagcccgtgagcttccac

SEQ ID NO: 1222 - DNA, 240 bp, Artificial sequence
  Synthetic
tacagcccctactgcctgacccaggacgagttccaccccttcatcgaggccctgctgccccacgtgagagccttcagctacacctggttcaacctgcaggccagaaagagaaagtacttcaagaagcacgagaagagaatgagcaaggacgaggagagagccgtgaaggacgagctgctgggcgagaagcccgagatcaagcagaagtgggccagcagactgctggccaagctgagaaag

SEQ ID NO: 1223 - DNA, 240 bp, Artificial sequence
  Synthetic
cagggccaccccttcttcagaaacgtggactgggacatgatggagcagaagcaggtggtgccccccttcaagcccaacatcagcggcgagttcggcctggacaacttcgacagccagttcaccaacgagcccgtgcagctgacccccgacgacgacgacatcgtgagaaagatcgaccagagcgagttcgagggcttcgagtacatcaaccccctgctgatgagcgccgaggagtgcgtg

SEQ ID NO: 1224 - DNA, 240 bp, Artificial sequence
  Synthetic
agcttcctggtgaacatgaagctggaggccgtggacagaagaaaccccgccctgatcagagtggccagcgtggaggacgtggaggaccacagaatcaagatccacttcgacggctggagccacggctacgacttctggatcgacgccgaccaccccgacatccaccccgccggctggtgcagcaagaccggacaccccctgcagcctcctctgggccccagagagcccagcagcgctagc

SEQ ID NO: 1225 - DNA, 240 bp, Artificial sequence
  Synthetic
ctgcagtgcaacaaccacgcctgcggctgggacggcggcgactgcagcctgaacttcaacgacccctggaagaactgcacccagagcctgcagtgctggaagtacttcagcgacggccactgcgacagccagtgcaacagcgccggctgcctgttcgacggcttcgactgccagagagccgagggccagtgcaaccccctgtacgaccagtactgcaaggaccacttcagcgacggccac

SEQ ID NO: 1226 - DNA, 240 bp, Artificial sequence
  Synthetic
ctgctggtgcagagaaccgagggcttcagcggcctggacgtggcccacctgtgccaggaggccgtggtgggacctctgcacgccatgcccgccaccgacctgagcgccatcatgcccagccagctgagacccgtgacctaccaggacttcgagaacgccttctgcaagatccagcccagcatcagccagaaggagctggacatgtacgtggagtggaacaagatgttcggctgcagccag

SEQ ID NO: 1227 - DNA, 240 bp, Artificial sequence
  Synthetic
agactgggcgagcaggaggccaagagaaacggcaccggcatcaacccctactgcgccctgatcgaggaggcctacggcctggacaagatcgagttcctgcagagccacgagaaccaggagatctaccagaaggccttcgacctgatcgagcactacttcggcaccgaggacgaggacagcagcatcgccccccaggtggacctgaaccagcagcagtacatcttccagcagtgcgaggcc

SEQ ID NO: 1228 - DNA, 240 bp, Artificial sequence
  Synthetic
caggaggagaacgtgagagacacccagcaggtgaccaccctgcagctgccccccagcagagtgagccccttcaaggacatgatcctgtgcttcagcgaggaggactggagcctgctggaccccgcccagaccggcttctacggcgagttcatcatcggcgaggactacggcgtgagcatgccccccaacgacctggccgcccagcccgaccttagccagggcgaggagaacgagcccaga

SEQ ID NO: 1229 - DNA, 213 bp, Artificial sequence
  Synthetic
gatgccaagtcccttgaggaggagtctcggaccctggttacctttaaggatgtgttcgtcgacttcactagggaagaatggaaactactagacacagcacaacaaatagtatacagaaacgtaatgctagaaaactacaaaaacctagtaagcctaggataccaactaacaaaaccagacgtaatactaagactagaaaaaggagaagaacca

SEQ ID NO: 1230 - DNA, 213 bp, Artificial sequence
  Synthetic
gatgccaagtccttgaccgctgaggaggagaccctggtcactttcaaggacgtttttgtggatttcacgagggaagaatggaaactactagacacagcacaacaaatagtatacagaaacgtaatgctagaaaactacaaaaacctagtaagcctaggataccaactaacaaaaccagacgtaatactaagactagaaaaaggagaagaacca

SEQ ID NO: 1231 - DNA, 213 bp, Artificial sequence
  Synthetic
gatgctaagtccctgaccgccgatgatgacacccttgtgacttttaaggatgtcttcgttgacttcacgagggaagaatggaaactactagacacagcacaacaaatagtatacagaaacgtaatgctagaaaactacaaaaacctagtaagcctaggataccaactaacaaaaccagacgtaatactaagactagaaaaaggagaagaacca

SEQ ID NO: 1232 - DNA, 213 bp, Artificial sequence
  Synthetic
gatgctaagtctctgaccgcctggtcccggactcttgttacgtttaaggacgtgttcgtcgatttcaccagggaagaatggaaactactagacacagcacaacaaatagtatacagaaacgtaatgctagagaactacaaaaacctagtaagcctaggataccaactcacaaaaccagacgtaatactaagactagaaaaaataataatacca

SEQ ID NO: 1233 - DNA, 213 bp, Artificial sequence
  Synthetic
gatgccaagtcccttaccccccctccccggactctggtgacgtttaaggatgtcttcgttgacttcaccagggaagaatggaaactactagacacagcacaacaaatagtatacagaaacgtaatgctagaaaactacaaaaacctagtaagcctaggataccaactaacaaaaccagacgtaatactaagactagaaaaaggagaagaacca

SEQ ID NO: 1234 - DNA, 213 bp, Artificial sequence
  Synthetic
gataataagtcccttaccgcctggtctcggacgctggttactttcaaggacgtcttcgtggattttaccagggaagaatggaaactactagacacagcacaacaaatagtatacagaaacgtaatgctagaaaactacaaaaacctagtaagcctaggataccaactaacaaaaccagacgtaatactaagactagaaaaaggagaagaacca

SEQ ID NO: 1235 - DNA, 213 bp, Artificial sequence
  Synthetic
gatgctaagtctttgactgcctggtcccctccccccgttaccttcaaggatgtgtttgtcgacttcaccagggaagaatggaaactactagacacagcacaacaaatagtatacagaaacgtaatgctagaaaactacaaaaacctagtaagcctaggataccaactaacaaaaccagacgtaatactaagactagaaaaaggagaagaacca

SEQ ID NO: 1236 - DNA, 213 bp, Artificial sequence
  Synthetic
gacgccaagtccctgacggaggagtctcggacccttgtgacttttaaggatgtcttcgttgatttcaccagggaagaatggaaactactagacacagcacaacaaatagtatacagaaacgtaatgctagaaaactacaaaaacctagtaagcctaggataccaactaacaaaaccagacgtaatactaagactagaaaaaggagaagaacca

SEQ ID NO: 1237 - DNA, 213 bp, Artificial sequence
  Synthetic
gacgctaagtcccttaccgccgccgcgaggaccctggttacttttaaggatgtcttcgtggatttcacgcgggaagaatggaaactactagacacagcacaacaaatagtatacagaaacgtaatgctagaaaactacaaaaacctagtaagcctaggataccaactaacaaaaccagacgtaatactaagactagaaaaaggagaagaacca

SEQ ID NO: 1238 - DNA, 213 bp, Artificial sequence
  Synthetic
gatgccaagtctgtgaccgcttggtcccggacgcttgtcaccttcaaggacgtttttgtggatttcactagggaagaatggaaactactagacacagcacaacaaatagtatacagaaacgtaatgctagaaaactacaaaaacctagtaagcctaggataccaactaacaaaaccagacgtaatactaagactagaaaaaggagaagaacca

SEQ ID NO: 1239 - DNA, 213 bp, Artificial sequence
  Synthetic
gatgctaagtctcttaccgccccctcccggactctggtcaccttcaaggacgtgttcgttgattttacgagggaagaatggaaactactagacacagcacaacaaatagtatacagaaacgtaatgctagaaaactacaaaaacctagtaagcctaggataccaactaacaaaaccagacgtaatactaagactagaaaaaggagaagaacca

SEQ ID NO: 1240 - DNA, 213 bp, Artificial sequence
  Synthetic
gacgccaagtcccttaccgctggcgggcggaccctggtgactttcaaggatgttttcgtcgattttacgagggaagaatggaaactactagacacagcacaacaaatagtatacagaaacgtaatgctagaaaactacaaaaacctagtaagcctaggataccaactaacaaaaccagacgtaatactaagactagaaaaaggagaagaacca

SEQ ID NO: 1241 - DNA, 213 bp, Artificial sequence
  Synthetic
gatgccaagtctcttaataataattcccggactctggtgacctttaaggacgttttcgtcgatttcaccagggaagaatggaaactactagacacagcacaacaaatagtatacagaaacgtaatgctagaaaactacaaaaacctagtaagcctaggataccaactaacaaaaccagacgtaatactaagactagaaaaaggagaagaacca

SEQ ID NO: 1242 - DNA, 213 bp, Artificial sequence
  Synthetic
gatgccaagtcccttaccgctcagcagcagactctggtcacgttcaaggacgtttttgtggatttcaccagggaagaatggaaactactagacacagcacaacaaatagtatacagaaacgtaatgctagaaaactacaaaaacctagtaagcctaggataccaactaacaaaaccagacgtaatactaagactagaaaaaggagaagaacca

SEQ ID NO: 1243 - DNA, 213 bp, Artificial sequence
  Synthetic
gatgctaagtctcttactgcctggtcccggcctcccgtgaccttcaaggatgtcttcgttgactttaccagggaagaatggaaactactagacacagcacaacaaatagtatacagaaacgtaatgctagaaaactacaaaaacctagtaagcctaggataccaactaacaaaaccagacgtaatactaagactagaaaaaggagaagaacca

SEQ ID NO: 1244 - DNA, 213 bp, Artificial sequence
  Synthetic
gacgctaagtccctgaccgccacgacccggactcttgtcactttcaaggatgtgttcgttgattttaccagggaagaatggaaactactagacacagcacaacaaatagtatacagaaacgtaatgctagaaaactacaaaaacctagtaagcctaggataccaactaacaaaaccagacgtaatactaagactagaaaaaggagaagaacca

SEQ ID NO: 1245 - DNA, 213 bp, Artificial sequence
  Synthetic
gatgccaagtctcttaccgcttggtccagggaggaggtcactttcaaggacgtgttcgttgattttacccgggaagaatggaaactactagacacagcacaacaaatagtatacagaaacgtaatgctagaaaactacaaaaacctagtaagcctaggataccaactaacaaaaccagacgtaatactaagactagaaaaaggagaagaacca

SEQ ID NO: 1246 - DNA, 213 bp, Artificial sequence
  Synthetic
gatgccaagtcccttaccgctgatgaccggaccctggtcacgttcaaggatgtgtttgttgacttcactagggaagaatggaaactactagacacagcacaacaaatagtatacagaaacgtaatgctagaaaactacaaaaacctagtaagcctaggataccaactaacaaaaccagacgtaatactaagactagaaaaaggagaagaacca

SEQ ID NO: 1247 - DNA, 213 bp, Artificial sequence
  Synthetic
gatgccaagtcccttacgcagcagcagcggactctggttaccttcaaggacgtgtttgtcgatttcaccagggaagaatggaaactactagacacagcacaacaaatagtatacagaaacgtaatgctagaaaactacaaaaacctagtaagcctaggataccaactaacaaaaccagacgtaatactaagactagaaaaaggagaagaacca

SEQ ID NO: 1248 - DNA, 213 bp, Artificial sequence
  Synthetic
gacgccaagtccgaggaggagtggtctaggacccttgtcacctttaaggatgttttcgtggatttcactcgggaagaatggaaactactagacacagcacaacaaatagtatacagaaacgtaatgctagaaaactacaaaaacctagtaagcctaggataccaactaacaaaaccagacgtaatactaagactagaaaaaggagaagaacca

SEQ ID NO: 1249 - DNA, 213 bp, Artificial sequence
  Synthetic
gatgccaagtcccttaccgacgactctaggacgctggttacttttaaggatgtgttcgtcgatttcacccgggaagaatggaaactactagacacagcacaacaaatagtatacagaaacgtaatgctagaaaactacaaaaacctagtaagcctaggataccaactaacaaaaccagacgtaatactaagactagaaaaaggagaagaacca

SEQ ID NO: 1250 - DNA, 213 bp, Artificial sequence
  Synthetic
gacgctaagtccctgacggccaataatcggacccttgttacctttaaggatgtgttcgtcgatttcactagggaagaatggaaactactagacacagcacaacaaatagtatacagaaacgtaatgctagaaaactacaaaaacctagtaagcctaggataccaactaacaaaaccagacgtaatactaagactagaaaaaggagaagaacca

SEQ ID NO: 1251 - DNA, 213 bp, Artificial sequence
  Synthetic
aataataattctcttaccgcctggtccaggacgctggtgaccttcaaggatgtttttgtcgatttcactcgggaagaatggaaactactagacacagcacaacaaatagtatacagaaacgtaatgctagaaaactacaaaaacctagtaagcctaggataccaactaacaaaaccagacgtaatactaagactagaaaaaggagaagaacca

SEQ ID NO: 1252 - DNA, 213 bp, Artificial sequence
  Synthetic
gatgccaagtccctgggcggtgggtctcggacccttgttacttttaaggacgtgttcgtcgatttcaccagggaagaatggaaactactagacacagcacaacaaatagtatacagaaacgtaatgctagaaaactacaaaaacctagtaagcctaggataccaactaacaaaaccagacgtaatactaagactagaaaaaggagaagaacca

SEQ ID NO: 1253 - DNA, 213 bp, Artificial sequence
  Synthetic
gatgccaagtcccttaccgacgacgataggactctggttaccttcaaggatgtgttcgtcgattttacgcgggaagaatggaaactactagacacagcacaacaaatagtatacagaaacgtaatgctagaaaactacaaaaacctagtaagcctaggataccaactaacaaaaccagacgtaatactaagactagaaaaaggagaagaacca

SEQ ID NO: 1254 - DNA, 213 bp, Artificial sequence
  Synthetic
gatgccaagtctctggacgatgattcccggacccttgtcacctttaaggatgtgttcgttgacttcactagggaagaatggaaactactagacacagcacaacaaatagtatacagaaacgtaatgctagaaaactacaaaaacctagtaagcctaggataccaactaacaaaaccagacgtaatactaagactagaaaaaggagaagaacca

SEQ ID NO: 1255 - DNA, 213 bp, Artificial sequence
  Synthetic
gacgccaagtctctgactgcttggtcccggaccctggtgacgtttaaggatgtcttcgttgatttcaccagggaagaatggaaactactagacacagcacaacaaatagtatacagaaacgtaatgctagaaaactacaaaaacctagtaagcctaggataccaactaacaaaaccagacgtaataaaaaaactagaaaaaggagaagaacca

SEQ ID NO: 1256 - DNA, 213 bp, Artificial sequence
  Synthetic
gatgctaagtcccttaccgccgattctaggacgctggtgaccttcaaggatgtctttgttgacttcactcgggaagaatggaaactactagacacagcacaacaaatagtatacagaaacgtaatgctagaaaactacaaaaacctagtaagcctaggataccaactaacaaaaccagacgtaatactaagactagaaaaaggagaagaacca

SEQ ID NO: 1257 - DNA, 213 bp, Artificial sequence
  Synthetic
gatgccaagtctctgaagaagaagtcccggacccttgtcactttcaaggacgtttttgtggatttcaccagggaagaatggaaactactagacacagcacaacaaatagtatacagaaacgtaatgctagaaaactacaaaaacctagtaagcctaggataccaactaacaaaaccagacgtaatactaagactagaaaaaggagaagaacca

SEQ ID NO: 1258 - DNA, 213 bp, Artificial sequence
  Synthetic
gatgccaagtctctgaccgctgagtccaggactcttgttacgttcaaggatgtctttgtggacttcacccgggaagaatggaaactactagacacagcacaacaaatagtatacagaaacgtaatgctagaaaactacaaaaacctagtaagcctaggataccaactaacaaaaccagacgtaatactaagactagaaaaaggagaagaacca

SEQ ID NO: 1259 - DNA, 213 bp, Artificial sequence
  Synthetic
gacgccaagtcccttacggctccccctcggaccctggtcactttcaaggatgttttcgtggattttaccagggaagaatggaaactactagacacagcacaacaaatagtatacagaaacgtaatgctagaaaactacaaaaacctagtaagcctaggataccaactaacaaaaccagacgtaatactaagactagaaaaaggagaagaacca

SEQ ID NO: 1260 - DNA, 213 bp, Artificial sequence
  Synthetic
gatgccaagtcccttactgctcctccccccacgctggttacctttaaggacgtgttcgtcgatttcaccagggaagaatggaaactactagacacagcacaacaaatagtatacagaaacgtaatgctagaaaactacaaaaacctagtaagcctaggataccaactaacaaaaccagacgtaatactaagactagaaaaaggagaagaacca

SEQ ID NO: 1261 - DNA, 213 bp, Artificial sequence
  Synthetic
gatgctaagtccctgacggcctgggacgatactttggtgacctttaaggacgtcttcgttgatttcaccagggaagaatggaaactactagacacagcacaacaaatagtatacagaaacgtaatgctagaaaactacaaaaacctagtaagcctaggataccaactaacaaaaccagacgtaatactaagactagaaaaaggagaagaacca

SEQ ID NO: 1262 - DNA, 213 bp, Artificial sequence
  Synthetic
gacgctaagtcccttacggccaataataatactctggttacctttaaggatgtcttcgtggatttcaccagggaagaatggaaactactagacacagcacaacaaatagtatacagaaacgtaatgctagaaaactacaaaaacctagtaagcctaggataccaactaacaaaaccagacgtaatactaagactagaaaaaggagaagaacca

SEQ ID NO: 1263 - DNA, 213 bp, Artificial sequence
  Synthetic
gatgccaagtctctgactgctatgtccaggacccttgtcaccttcaaggacgtgtttgttgatttcacgcgggaagaatggaaactactagacacagcacaacaaatagtatacagaaacgtaatgctagaaaactacaaaaacctagtaagcctaggataccaactaacaaaaccagacgtaatactaagactagaaaaaggagaagaacca

SEQ ID NO: 1264 - DNA, 213 bp, Artificial sequence
  Synthetic
gatgccaagtcccttaccgcttggaataataatctggtgactttcaaggatgtttttgtcgacttcaccagggaagaatggaaactactagacacagcacaacaaatagtatacagaaacgtaatgctagaaaactacaaaaacctagtaagcctaggataccaactaacaaaaccagacgtaatactaagactagaaaaaggagaagaacca

SEQ ID NO: 1265 - DNA, 213 bp, Artificial sequence
  Synthetic
gatgctaagtccctgaccgcctggtctaataatttggttaccttcaaggatgtgtttgtcgacttcactagggaagaatggaaactactagacacagcacaacaaatagtatacagaaacgtaatgctagaaaactacaaaaacctagtaagcctaggataccaactaacaaaaccagacgtaatactaagactagaaaaaggagaagaacca

SEQ ID NO: 1266 - DNA, 213 bp, Artificial sequence
  Synthetic
gacgccaagtcccttacgcccccttctcggactctggtgacctttaaggatgtcttcgttgatttcaccagggaagaatggaaactactagacacagcacaacaaatagtatacagaaacgtaatgctagaaaactacaaaaacctagtaagcctaggataccaactaacaaaaccagacgtaatactaagactagaaaaaggagaagaacca

SEQ ID NO: 1267 - DNA, 213 bp, Artificial sequence
  Synthetic
gacgccaagtccctgacggaggaggagcggactcttgtgacctttaaggatgttttcgtcgatttcaccagggaagaatggaaactactagacacagcacaacaaatagtatacagaaacgtaatgctagaaaactacaaaaacctagtaagcctaggataccaactaacaaaaccagacgtaatactaagactagaaaaaggagaagaacca

SEQ ID NO: 1268 - DNA, 213 bp, Artificial sequence
  Synthetic
gatgctaagtctttggccgcggcctccaggacccttgtgactttcaaggacgtttttgtcgatttcacccgggaagaatggaaactactagacacagcacaacaaatagtatacagaaacgtaatgctagaaaactacaaaaacctagtaagcctaggataccaactaacaaaaccagacgtaatactaagactagaaaaaggagaagaacca

SEQ ID NO: 1269 - DNA, 213 bp, Artificial sequence
  Synthetic
gatgctaagtccctgaccgcccagcagcggacgcttgttactttcaaggatgtctttgtggacttcaccagggaagaatggaaactactagacacagcacaacaaatagtatacagaaacgtaatgctagaaaactacaaaaacctagtaagcctaggataccaactaacaaaaccagacgtaatactaagactagaaaaaggagaagaacca

SEQ ID NO: 1270 - DNA, 213 bp, Artificial sequence
  Synthetic
gatgccaagtcccttaccgcttggtctgaggaggaggttactttcaaggatgtgtttgtcgacttcaccagggaagaatggaaactactagacacagcacaacaaatagtatacagaaacgtaatgctagaaaactacaaaaacctagtaagcctaggataccaactaacaaaaccagacgtaatactaagactagaaaaaggagaagaacca

SEQ ID NO: 1271 - DNA, 213 bp, Artificial sequence
  Synthetic
gatgccaagtctctgactcagcagtcccggacccttgtgacgttcaaggacgttttcgtcgattttaccagggaagaatggaaactactagacacagcacaacaaatagtatacagaaacgtaatgctagaaaactacaaaaacctagtaagcctaggataccaactaacaaaaccagacgtaatactaagactagaaaaaggagaagaacca

SEQ ID NO: 1272 - DNA, 213 bp, Artificial sequence
  Synthetic
gacgctaagtcccttacggcctggtctaggaccctggtcacctttaaggatgttttcgtggatttcactcgggaagaatggaaactactagacacagcacaacaaatagtatacagagaagtaatgctagaaaactacaaaaacctagtaagcctaggataccaactaacaaaaccagacgtaatactaagactagaaaaaggagaagaacca

SEQ ID NO: 1273 - DNA, 213 bp, Artificial sequence
  Synthetic
gatgccaagtctcttaccgcttggtccaggcccctggtgactttcaaggatgtctttgttgacttcacccgggaagaatggaaactactagacacagcacaacaaatagtatacagaaacgtaatgctagaaaactacaaaaacctagtaagcctaggataccaactaacaaaaccagacgtaatactaagactagaaaaaggagaagaacca

SEQ ID NO: 1274 - DNA, 213 bp, Artificial sequence
  Synthetic
gacgctaagtccaccaccgcctggtctaggactcttgttacgttcaaggatgtgtttgtcgatttcactcgggaagaatggaaactactagacacagcacaacaaatagtatacagaaacgtaatgctagaaaactacaaaaacctagtaagcctaggataccaactaacaaaaccagacgtaatactaagactagaaaaaggagaagaacca

SEQ ID NO: 1275 - DNA, 213 bp, Artificial sequence
  Synthetic
gacgccaagtctcttaccgcttggtccaataataatgttactttcaaggatgtgtttgtcgatttcaccagggaagaatggaaactactagacacagcacaacaaatagtatacagaaacgtaatgctagaaaactacaaaaacctagtaagcctaggataccaactaacaaaaccagacgtaatactaagactagaaaaaggagaagaacca

SEQ ID NO: 1276 - DNA, 213 bp, Artificial sequence
  Synthetic
gatgctaagtcccttactgcctgggacgatgatctggtcaccttcaaggacgtttttgtggatttcaccagggaagaatggaaactactagacacagcacaacaaatagtatacagaaacgtaatgctagaaaactacaaaaacctagtaagcctaggataccaactaacaaaaccagacgtaatactaagactagaaaaaggagaagaacca

SEQ ID NO: 1277 - DNA, 213 bp, Artificial sequence
  Synthetic
gatgctaagtcccttactgccgcctctcggacgctggtgaccttcaaggacgttttcgtcgattttaccagggaagaatggaaactactagacacagcacaacaaatagtatacagaaacgtaatgctagaaaactacaaaaacctagtaagcctaggataccaactaacaaaaccagacgtaatactaagactagaaaaaggagaagaacca

SEQ ID NO: 1278 - DNA, 213 bp, Artificial sequence
  Synthetic
gacgccaagtctttgacggctggctcccggacccttgtgactttcaaggatgtcttcgttgattttaccagggaagaatggaaactactagacacagcacaacaaatagtatacagaaacgtaatgctagaaaactacaaaaacctagtaagcctaggataccaactaacaaaaccagacgtaatactaagactagaaaaaggagaagaacca

SEQ ID NO: 1279 - DNA, 213 bp, Artificial sequence
  Synthetic
gacgctaagagtctgactgcctcttcccggacccttgtcacgttcaaggatgttttcgtggattttaccagggaagaatggaaactactagacacagcacaacaaatagtatacagaaacgtaatgctagaaaactacaaaaacctagtaagcctaggataccaactaacaaaaccagacgtaatactaagactagaaaaaggagaagaacca

SEQ ID NO: 1280 - DNA, 213 bp, Artificial sequence
  Synthetic
gatgccaagtccctgacgtctagttcaaggactcttgtgacctttaaggacgtcttcgttgatttcacccgggaagaatggaaactactagacacagcacaacaaatagtatacagaaacgtaatgctagaaaactacaaaaacctagtaagcctaggataccaactaacaaaaccagacgtaatactaagactagaaaaaggagaagaacca

SEQ ID NO: 1281 - DNA, 213 bp, Artificial sequence
  Synthetic
gatgctaaggatgacactgcctggtcccggacgcttgtgacctttaaggatgtcttcgttgacttcaccagggaagaatggaaactactagacacagcacaacaaatagtatacagaaacgtaatgctagaaaactacaaaaacctagtaagcctaggataccaactaacaaaaccagacgtaatactaagactagaaaaaggagaagaacca

SEQ ID NO: 1282 - DNA, 213 bp, Artificial sequence
  Synthetic
gatgccaagtctctgaccgcttggtccaggacgcttgtgactttcaaggatgtcttcgttgactttacccgggaagaatggaaactactagacacagcacaacaaatagtatacagaaacgtaatgctagaaaactacaaaaacctagtaagcctaggataccaacacacaaaaccagacgtaatactaagactagaaaaaggagaagaacca

SEQ ID NO: 1283 - DNA, 213 bp, Artificial sequence
  Synthetic
gatgccaagtcccttaccaagaagtctaggactctggttaccttcaaggacgtctttgtggatttcacgcgggaagaatggaaactactagacacagcacaacaaatagtatacagaaacgtaatgctagaaaactacaaaaacctagtaagcctaggataccaactaacaaaaccagacgtaatactaagactagaaaaaggagaagaacca

SEQ ID NO: 1284 - DNA, 213 bp, Artificial sequence
  Synthetic
gatgccaagtcccttactgcttggtctgaggagctggtgaccttcaaggatgtctttgttgacttcaccagggaagaatggaaactactagacacagcacaacaaatagtatacagaaacgtaatgctagaaaactacaaaaacctagtaagcctaggataccaactaacaaaaccagacgtaatactaagactagaaaaaggagaagaacca

SEQ ID NO: 1285 - DNA, 213 bp, Artificial sequence
  Synthetic
gatgccaagtcccttaccgcttggcagcagcagctggtcactttcaaggacgtgttcgttgattttaccagggaagaatggaaactactagacacagcacaacaaatagtatacagaaacgtaatgctagaaaactacaaaaacctagtaagcctaggataccaactaacaaaaccagacgtaatactaagactagaaaaaggagaagaacca

SEQ ID NO: 1286 - DNA, 213 bp, Artificial sequence
  Synthetic
gatgccaagtcccttacggcttggtctaggaccaccgtgactttcaaggacgttttcgtcgattttactcgggaagaatggaaactactagacacagcacaacaaatagtatacagaaacgtaatgctagaaaactacaaaaacctagtaagcctaggataccaactaacaaaaccagacgtaatactaagactagaaaaaggagaagaacca

SEQ ID NO: 1287 - DNA, 213 bp, Artificial sequence
  Synthetic
gatgccaagtctcttaccgctaattccaggacgctggtcaccttcaaggatgtttttgtggacttcactcgggaagaatggaaactactagacacagcacaacaaatagtatacagaaacgtaatgctagaaaactacaaaaacctagtaagcctaggataccaactaacaaaaccagacgtaatactaagactagaaaaaggagaagaacca

SEQ ID NO: 1288 - DNA, 213 bp, Artificial sequence
  Synthetic
gacgccaagtctctgcagcagcagtcccggactcttgttaccttcaaggatgtgtttgtcgatttcaccagggaagaatggaaactactagacacagcacaacaaatagtatacagaaacgtaatgctagaaaactacaaaaacctagtaagcctaggataccaactaacaaaaccagacgtaatactaagactagaaaaaggagaagaacca

SEQ ID NO: 1289 - DNA, 213 bp, Artificial sequence
  Synthetic
gatgctaagtcccttaccgcctggcctcccaccctggttacttttaaggatgtgttcgtcgacttcacgagggaagaatggaaactactagacacagcacaacaaatagtatacagaaacgtaatgctagaaaactacaaaaacctagtaagcctaggataccaactaacaaaaccagacgtaatactaagactagaaaaaggagaagaacca

SEQ ID NO: 1290 - DNA, 213 bp, Artificial sequence
  Synthetic
gacgctaaggaggaggaggcctggtccaggacccttgttacctttaaggatgtgttcgtcgatttcactcgggaagaatggaaactactagacacagcacaacaaatagtatacagaaacgtaatgctagaaaactacaaaaacctagtaagcctaggataccaactaacaaaaccagacgtaatactaagactagaaaaaggagaagaacca

SEQ ID NO: 1291 - DNA, 213 bp, Artificial sequence
  Synthetic
gatgccaagtccctgaccaataattctcggacccttgtcacttttaaggacgtgttcgttgatttcacgagggaagaatggaaactactagacacagcacaacaaatagtatacagaaacgtaatgctagaaaactacaaaaacctagtaagcctaggataccaactaacaaaaccagacgtaatactaagactagaaaaaggagaagaacca

SEQ ID NO: 1292 - DNA, 213 bp, Artificial sequence
  Synthetic
gatgctaagtctcttacggcctggtccaggaccgatgtgactttcaaggacgttttcgtcgattttacccgggaagaatggaaactactagacacagcacaacaaatagtatacagaaacgtaatgctagaaaactacaaaaacctagtaagcctaggataccaactaacaaaaccagacgtaatactaagactagaaaaaggagaagaacca

SEQ ID NO: 1293 - DNA, 213 bp, Artificial sequence
  Synthetic
gacgccaagtcccttactgctactaccaccacgctggttacctttaaggatgtcttcgtggatttcacaagggaagaatggaaactactagacacagcacaacaaatagtatacagaaacgtaatgctagaaaactacaaaaacctagtaagcctaggataccaactaacaaaaccagacgtaatactaagactagaaaaaggagaagaacca

SEQ ID NO: 1294 - DNA, 213 bp, Artificial sequence
  Synthetic
gatgccaagtcccttaccgcttggtctgatgacctggttaccttcaaggacgtcttcgtggattttactagggaagaatggaaactactagacacagcacaacaaatagtatacagaaacgtaatgctagaaaactacaaaaacctagtaagcctaggataccaactaacaaaaccagacgtaatactaagactagaaaaaggagaagaacca

SEQ ID NO: 1295 - DNA, 213 bp, Artificial sequence
  Synthetic
gatgctaagtccctcaccgccaagtctaggaccttggtcacgttcaaggacgttttcgtggattttactcgggaagaatggaaactactagacacagcacaacaaatagtatacagaaacgtaatgctagaaaactacaaaaacctagtaagcctaggataccaactaacaaaaccagacgtaatactaagactagaaaaaggagaagaacca

SEQ ID NO: 1296 - DNA, 213 bp, Artificial sequence
  Synthetic
gatgccaagtctctgaccgcttggtcccggacccttgtcacgttcgaggatgttttcgtggactttactagggaagaatggaaactactagacacagcacaacaaatagtatacagaaacgtaatgctagaaaactacaaaaacctagtaagcctaggataccaactaacaaaaccagacgtaatactaagactagaaaaaggagaagaacca

SEQ ID NO: 1297 - DNA, 213 bp, Artificial sequence
  Synthetic
gatgccaagtccctgactgcttggtctaggacccttgtgacctttgatgatgttttcgtcgacttcacgcgggaagaatggaaactactagacacagcacaacaaatagtatacagaaacgtaatgctagaaaactacaaaaacctagtaagcctaggataccaactaacaaaaccagacgtaatactaagactagaaaaaggagaagaacca

SEQ ID NO: 1298 - DNA, 213 bp, Artificial sequence
  Synthetic
gacgctaagtcccttaccgcctggtctcggacgctggtgacctttgatgatgtcttcgttgatttcactagggaagaatggaaactactagacacagcacaacaaatagtatacagaaacgtaatgctagaaaactacaaaaacctagtaagcctaggataccaactaacaaaaccagacgtaatactaagactagaaaaaggagaagaacca

SEQ ID NO: 1299 - DNA, 213 bp, Artificial sequence
  Synthetic
gacgctaagtcccttaccgcctggtctcagcagcaggttactttcaaggatgtctttgtggatttcaccagggaagaatggaaactactagacacagcacaacaaatagtatacagaaacgtaatgctagaaaactacaaaaacctagtaagcctaggataccaactaacaaaaccagacgtaatactaagactagaaaaaggagaagaacca

SEQ ID NO: 1300 - DNA, 213 bp, Artificial sequence
  Synthetic
gatgctaagagccttaccgcctggtcccggaccctggtgactttcaaggacgtcttcgttgattttacgagggaagaatggaaactactagacacagcacaacaaatagtatacagaaacgtaatgctagaaaactacaaaaacctagtagaactaggataccaactaacaaaaccagacgtaatactaagactagaaaaaggagaagaacca

SEQ ID NO: 1301 - DNA, 213 bp, Artificial sequence
  Synthetic
gacgccaagtcccttaccgcttgggaggaggagctggtcactttcaaggatgtttttgtggatttcaccagggaagaatggaaactactagacacagcacaacaaatagtatacagaaacgtaatgctagaaaactacaaaaacctagtaagcctaggataccaactaacaaaaccagacgtaatactaagactagaaaaaggagaagaacca

SEQ ID NO: 1302 - DNA, 213 bp, Artificial sequence
  Synthetic
gatgctaagtccctgaccgcctggtctcggacccttgtgacgttcaaggacgtctttgttgatttcactagggaagaatggaaactactagacacagcacaacaagaagtatacagaaacgtaatgctagaaaactacaaaaacctagtaagcctaggataccaactaacaaaaccagacgtaatactaagactagaaaaaggagaagaacca

SEQ ID NO: 1303 - DNA, 213 bp, Artificial sequence
  Synthetic
gatgccaagtctcttacggcttggtcccggacccccgttacctttaaggacgtcttcgtggatttcactagggaagaatggaaactactagacacagcacaacaaatagtatacagaaacgtaatgctagaaaactacaaaaacctagtaagcctaggataccaactaacaaaaccagacgtaatactaagactagaaaaaggagaagaacca

SEQ ID NO: 1304 - DNA, 213 bp, Artificial sequence
  Synthetic
gacgccaagtcccttacggcttggtctcggactctggtcacctttaaggatgtgttcgttgatttcaccagggaagaatggaaactactagacacagcacaacaaatagtatacagaaacgtaatgctagaaaactacaaaaacctagtaagcctaggatacgaagaagaaaaaccagacgtaatactaagactagaaaaaggagaagaacca

SEQ ID NO: 1305 - DNA, 213 bp, Artificial sequence
  Synthetic
gatgctaagtccctgactgcctggtctaggacccttgtcacctttaaggatgtgttcgttgatttcacgcgggaagaatggaaactactagacacagcacaacaagacgactacagaaacgtaatgctagaaaactacaaaaacctagtaagcctaggataccaactaacaaaaccagacgtaatactaagactagaaaaaggagaagaacca

SEQ ID NO: 1306 - DNA, 213 bp, Artificial sequence
  Synthetic
gacgcgaagtccctgacggccgctgcccggactcttgttaccttcaaggatgtgttcgtcgattttaccagggaagaatggaaactactagacacagcacaacaaatagtatacagaaacgtaatgctagaaaactacaaaaacctagtaagcctaggataccaactaacaaaaccagacgtaatactaagactagaaaaaggagaagaacca

SEQ ID NO: 1307 - DNA, 213 bp, Artificial sequence
  Synthetic
gatgctaagtcccttacggcccagtctcggactctggttaccttcaaggatgtcttcgtggactttaccagggaagaatggaaactactagacacagcacaacaaatagtatacagaaacgtaatgctagaaaactacaaaaacctagtaagcctaggataccaactaacaaaaccagacgtaatactaagactagaaaaaggagaagaacca

SEQ ID NO: 1308 - DNA, 213 bp, Artificial sequence
  Synthetic
gatgctaagtccctcacggcggccgctgccacccttgtcaccttcaaggacgttttcgtggattttactagggaagaatggaaactactagacacagcacaacaaatagtatacagaaacgtaatgctagaaaactacaaaaacctagtaagcctaggataccaactaacaaaaccagacgtaatactaagactagaaaaaggagaagaacca

SEQ ID NO: 1309 - DNA, 213 bp, Artificial sequence
  Synthetic
gatgccaagtccctgaagaagtggtctcggacccttgtgacttttaaggatgttttcgtcgacttcaccagggaagaatggaaactactagacacagcacaacaaatagtatacagaaacgtaatgctagaaaactacaaaaacctagtaagcctaggataccaactaacaaaaccagacgtaatactaagactagaaaaaggagaagaacca

SEQ ID NO: 1310 - DNA, 213 bp, Artificial sequence
  Synthetic
gatgctaagtccctgacggccgggggtggcacccttgttaccttcaaggacgtctttgtggatttcactagggaagaatggaaactactagacacagcacaacaaatagtatacagaaacgtaatgctagaaaactacaaaaacctagtaagcctaggataccaactaacaaaaccagacgtaatactaagactagaaaaaggagaagaacca

SEQ ID NO: 1311 - DNA, 213 bp, Artificial sequence
  Synthetic
gatgatgattctctgacggcctggtcccggactcttgtcacctttaaggacgttttcgtggacttcaccagggaagaatggaaactactagacacagcacaacaaatagtatacagaaacgtaatgctagaaaactacaaaaacctagtaagcctaggataccaactaacaaaaccagacgtaatactaagactagaaaaaggagaagaacca

SEQ ID NO: 1312 - DNA, 213 bp, Artificial sequence
  Synthetic
gacgccaagtccctgaccgcttggtctcggacgcttgtgacctttaaggatgttttcgtcgatttcactagggaagaatggaaactactagacacacaacaacaaatagtatacagaaacgtaatgctagaaaactacaaaaacctagtaagcctaggataccaactaacaaaaccagacgtaatactaagactagaaaaaggagaagaacca

SEQ ID NO: 1313 - DNA, 213 bp, Artificial sequence
  Synthetic
gatgctaagtcccttaccgcctggtctcggacgctggtcaccttcaaggacgtgttcgttgattttactagggaagaatggaaactactagacacagcacaacaaatagtatacagaaacgtaatgctagaaaactacaaaaacctagtaagcctaggataccaactaacaaaaccagacgtaatactaagactagaaaaaggagaatactac

SEQ ID NO: 1314 - DNA, 213 bp, Artificial sequence
  Synthetic
gatgctaagtcccttacggccgaggagaggactctggtcaccttcaaggacgtgttcgttgattttacccgggaagaatggaaactactagacacagcacaacaaatagtatacagaaacgtaatgctagaaaactacaaaaacctagtaagcctaggataccaactaacaaaaccagacgtaatactaagactagaaaaaggagaagaacca

SEQ ID NO: 1315 - DNA, 213 bp, Artificial sequence
  Synthetic
gatgccaagtctctgacggctcactccaggactcttgtcaccttcaaggatgtgttcgttgactttacccgggaagaatggaaactactagacacagcacaacaaatagtatacagaaacgtaatgctagaaaactacaaaaacctagtaagcctaggataccaactaacaaaaccagacgtaatactaagactagaaaaaggagaagaacca

SEQ ID NO: 1316 - DNA, 213 bp, Artificial sequence
  Synthetic
gatgccaagtcccttcgccggtggtctcgaactctggtcacctttaaggatgtgttcgttgacttcaccagggaagaatggaaactactagacacagcacaacaaatagtatacagaaacgtaatgctagaaaactacaaaaacctagtaagcctaggataccaactaacaaaaccagacgtaatactaagactagaaaaaggagaagaacca

SEQ ID NO: 1317 - DNA, 213 bp, Artificial sequence
  Synthetic
gatgctaagtctcttactgcctggtccagctcaagtgtgacctttaaggacgttttcgtcgatttcaccagggaagaatggaaactactagacacagcacaacaaatagtatacagaaacgtaatgctagaaaactacaaaaacctagtaagcctaggataccaactaacaaaaccagacgtaatactaagactagaaaaaggagaagaacca

SEQ ID NO: 1318 - DNA, 213 bp, Artificial sequence
  Synthetic
gatgccaagtctcttaccgcttggtcccggactctggtcacgtttaaggacgttttcgtggatttcaccagggaagaatggaaactactagacacagcacaacaaatagtatacagaaacgtaatgctagaaaactacaaaaacctagtaagcctaggatggcaactaacaaaaccagacgtaatactaagactagaaaaaggagaagaacca

SEQ ID NO: 1319 - DNA, 213 bp, Artificial sequence
  Synthetic
gattcatcttccctgacggcctggagtaggacccttgttaccttcaaggacgtctttgtggatttcactcgggaagaatggaaactactagacacagcacaacaaatagtatacagaaacgtaatgctagaaaactacaaaaacctagtaagcctaggataccaactaacaaaaccagacgtaatactaagactagaaaaaggagaagaacca

SEQ ID NO: 1320 - DNA, 213 bp, Artificial sequence
  Synthetic
gatgccaagtctctgaccgcttggtcccggactcttgtgacgttcaaggacgtctttgttgatttcaccagggaagaatggaaactactagacacagcacaaaaaaaagtatacagaaacgtaatgctagaaaactacaaaaacctagtaagcctaggataccaactaacaaaaccagacgtaatactaagactagaaaaaggagaagaacca

SEQ ID NO: 1321 - DNA, 213 bp, Artificial sequence
  Synthetic
gacgctaagtccctgaccgccaagaagaagactcttgtcaccttcaaggatgttttcgtggattttacgagggaagaatggaaactactagacacagcacaacaaatagtatacagaaacgtaatgctagaaaactacaaaaacctagtaagcctaggataccaactaacaaaaccagacgtaatactaagactagaaaaaggagaagaacca

SEQ ID NO: 1322 - DNA, 213 bp, Artificial sequence
  Synthetic
gatgctaagtcccttaccgcctggtctgggggtggcgtgaccttcaaggatgttttcgtcgactttactagggaagaatggaaactactagacacagcacaacaaatagtatacagaaacgtaatgctagaaaactacaaaaacctagtaagcctaggataccaactaacaaaaccagacgtaatactaagactagaaaaaggagaagaacca

SEQ ID NO: 1323 - DNA, 213 bp, Artificial sequence
  Synthetic
gatgccaagtcccttactgcttggtctgacgatgatgtgaccttcaaggatgttttcgtcgactttaccagggaagaatggaaactactagacacagcacaacaaatagtatacagaaacgtaatgctagaaaactacaaaaacctagtaagcctaggataccaactaacaaaaccagacgtaatactaagactagaaaaaggagaagaacca

SEQ ID NO: 1324 - DNA, 213 bp, Artificial sequence
  Synthetic
gatgctaagactaccacggcctggtccaggactcttgttacctttaaggatgtcttcgtggacttcacccgggaagaatggaaactactagacacagcacaacaaatagtatacagaaacgtaatgctagaaaactacaaaaacctagtaagcctaggataccaactaacaaaaccagacgtaatactaagactagaaaaaggagaagaacca

SEQ ID NO: 1325 - DNA, 213 bp, Artificial sequence
  Synthetic
gatgccaagtcccttactgcttggggcggtgggctggtgaccttcaaggacgtttttgtcgatttcaccagggaagaatggaaactactagacacagcacaacaaatagtatacagaaacgtaatgctagaaaactacaaaaacctagtaagcctaggataccaactaacaaaaccagacgtaatactaagactagaaaaaggagaagaacca

SEQ ID NO: 1326 - DNA, 213 bp, Artificial sequence
  Synthetic
gacgccaagtctctgactgcttggtcccgggagcttgtgacctttaaggatgtcttcgttgatttcaccagggaagaatggaaactactagacacagcacaacaaatagtatacagaaacgtaatgctagaaaactacaaaaacctagtaagcctaggataccaactaacaaaaccagacgtaatactaagactagaaaaaggagaagaacca

SEQ ID NO: 1327 - DNA, 213 bp, Artificial sequence
  Synthetic
gacgccaagtctgatgatgactggtcccggacccttgtcaccttcaaggatgttttcgtggattttactagggaagaatggaaactactagacacagcacaacaaatagtatacagaaacgtaatgctagaaaactacaaaaacctagtaagcctaggataccaactaacaaaaccagacgtaatactaagactagaaaaaggagaagaacca

SEQ ID NO: 1328 - DNA, 213 bp, Artificial sequence
  Synthetic
gacgccaagtcacttagcagttcctctaggactctggtgacctttaaggatgtcttcgttgatttcacccgggaagaatggaaactactagacacagcacaacaaatagtatacagaaacgtaatgctagaaaactacaaaaacctagtaagcctaggataccaactaacaaaaccagacgtaatactaagactagaaaaaggagaagaacca

SEQ ID NO: 1329 - DNA, 213 bp, Artificial sequence
  Synthetic
gacgctaagtcccttacggcctctagttcaaccctggtgaccttcaaggatgtcttcgttgattttactagggaagaatggaaactactagacacagcacaacaaatagtatacagaaacgtaatgctagaaaactacaaaaacctagtaagcctaggataccaactaacaaaaccagacgtaatactaagactagaaaaaggagaagaacca

SEQ ID NO: 1330 - protein, 4 aa, Artificial sequence
  Synthetic
RKKR

SEQ ID NO: 1331 - protein, 20 aa, Artificial sequence
  Synthetic
DAKSLTAWSRTLVTFKDVFV

SEQ ID NO: 1332 - protein, 20 aa, Artificial sequence
  Synthetic
AAKSLTAWSRTLVTFKDVFV

SEQ ID NO: 1333 - protein, 20 aa, Artificial sequence
  Synthetic
CAKSLTAWSRTLVTFKDVFV

SEQ ID NO: 1334 - protein, 20 aa, Artificial sequence
  Synthetic
DCKSLTAWSRTLVTFKDVFV

SEQ ID NO: 1335 - protein, 20 aa, Artificial sequence
  Synthetic
DDKSLTAWSRTLVTFKDVFV

SEQ ID NO: 1336 - protein, 20 aa, Artificial sequence
  Synthetic
KKKSLTAWSRTLVTFKDVFV

SEQ ID NO: 1337 - protein, 20 aa, Artificial sequence
  Synthetic
LLKSLTAWSRTLVTFKDVFV

SEQ ID NO: 1338 - protein, 20 aa, Artificial sequence
  Synthetic
GATGCTAAATCTTTAACTGC

SEQ ID NO: 1339 - protein, 20 aa, Artificial sequence
  Synthetic
GCCGCCAAGAGCCTGACCGC

SEQ ID NO: 1340 - protein, 20 aa, Artificial sequence
  Synthetic
TGCGCCAAGTCGCTGACCGC

SEQ ID NO: 1341 - protein, 20 aa, Artificial sequence
  Synthetic
GATTGCAAATCTCTTACTGC

SEQ ID NO: 1342 - protein, 20 aa, Artificial sequence
  Synthetic
GACGACAAGAGCCTGACCGC

SEQ ID NO: 1343 - protein, 20 aa, Artificial sequence
  Synthetic
AAAAAAAAAAGCCTGACCGC

SEQ ID NO: 1344 - protein, 20 aa, Artificial sequence
  Synthetic
CTGCTGAAAAGCCTGACCGC

SEQ ID NO: 1345 - protein, 80 aa, Artificial sequence [sequence omitted]

SEQ ID NO: 1346 - protein, 80 aa, Artificial sequence
  Synthetic
QHPPDACAFRRGRKKRIPYSKGQLRELEREYAANKFITKDKRRKISAATSLSERQITIWFQNRRVKEKKVLAKVKNSATP

SEQ ID NO: 1347 - protein, 80 aa, Artificial sequence
  Synthetic
LQPEVSSYRRGRKKRVPYTKVQLKELEKEYAASKFITKEKRRRISATTNLSERQVTIWFQNRRVKEKKVVSKSKAPHLHS

SEQ ID NO: 1348 - protein, 80 aa, Artificial sequence
  Synthetic
DKAGGSSGQRTRKKRCPYTKYQIRELEREFFFSVYINKEKRLQLSRMLNLTDRQVKIWFQNRRMKEKKINRDRLQYYSAN

SEQ ID NO: 1349 - protein, 80 aa, Artificial sequence
  Synthetic
AKGAAPNAPRTRKKRCPYSKFQIRELEREFFFNVYINKEKRLQLSRMLNLTDRQVKIWFQNRRMKEKKLSRDRLQYFSGN

SEQ ID NO: 1350 - protein, 80 aa, Artificial sequence
  Synthetic
TTGNWLTAKSGRKKRCPYTKHQTLELEKEFLFNMYLTRERRLEISKTINLTDRQVKIWFQNRRMKLKKMNRENRIRELTS

SEQ ID NO: 1351 - protein, 80 aa, Artificial sequence
  Synthetic
DGLPWGAAPGRARKKRKPYTKQQIAELENEFLVNEFINRQKRKELSNRLNLSDQQVKIWFQNRRMKKKRVVLREQALALY

SEQ ID NO: 1352 - protein, 80 aa, Artificial sequence
  Synthetic
NAANWLTAKSGRKKRCPYTKHQTLELEKEFLFNMYLTRERRLEISRSVHLTDRQVKIWFQNRRMKLKKMNRENRIRELTA

SEQ ID NO: 1353 - protein, 80 aa, Artificial sequence
  Synthetic
SGAPWYPINSRSRKKRKPYSKLQLAELEGEFLVNEFITRQRRRELSDRLNLSDQQVKIWFQNRRMKKKRLLLREQALSFF

SEQ ID NO: 1354 - protein, 80 aa, Artificial sequence
  Synthetic
DQTNPSANWLHARSSRKKRCPYTKYQTLELEKEFLFNMYLTRDRRHEVARLLNLSERQVKIWFQNRRMKMKKMNKEQGKE

SEQ ID NO: 1355 - protein, 80 aa, Artificial sequence
  Synthetic
PNNPAANWLHARSTRKKRCPYTKHQTLELEKEFLFNMYLTRDRRYEVARLLNLTERQVKIWFQNRRMKMKKINKDRAKDE

SEQ ID NO: 1356 - protein, 80 aa, Artificial sequence
  Synthetic
GDKSPPGQASSKRARTAYTSAQLVELEKEFHFNRYLCRPRRVEMANLLNLTERQIKIWFQNRRMKYKKDQKGKGMLTSSG

SEQ ID NO: 1357 - protein, 80 aa, Artificial sequence
  Synthetic
CEDKSPPGPASKRVRTAYTSAQLVELEKEFHFNRYLCRPRRVEMANLLNLTERQIKIWFQNRRMKYKKDQKAKGILHSPA

SEQ ID NO: 1358 - protein, 79 aa, Artificial sequence
  Synthetic
GDKSPPGSAASKRARTAYTSAQLVELEKEFHFNRYLCRPRRVEMANLLNLSEQIKIWFQNRRMKYKKDQKAKGLASSSG

SEQ ID NO: 1359 - protein, 80 aa, Artificial sequence
  Synthetic
PWMRPQAAPGRRRGRQTYSRFQTLELEKEFLFNPYLTRKRRIEVSHALALTERQVKIWFQNRRMKWKKENNKDKFPVSRQ

SEQ ID NO: 1360 - protein, 79 aa, Artificial sequence
  Synthetic
HISHDMTGPDGKRARTAYTRYQTLELEKEFHFNRYLTRRRRIEIAHALCLSERQIKWFQNRRMKWKKDNKLKSMSLATA

SEQ ID NO: 1361 - protein, 79 aa, Artificial sequence
  Synthetic
LEIADGSGGSRRLRTAYTNTQLLELEKEFHFNKYLCRPRRVEIAALLDLTERQVKVWFQNRRMKHKRQTQCKENQNSEQ

SEQ ID NO: 1362 - protein, 80 aa, Artificial sequence
  Synthetic
TVNPNYNGGEPKRSRTAYTRQQVLELEKEFHYNRYLTRRRRIEIAHSLCLSERQIKIWFQNRRMKWKKDHRLPNTKVRSA

SEQ ID NO: 1363 - protein, 79 aa, Artificial sequence
  Synthetic
SCNSSFGPGSRRGRQTYTRYQTLELEKEFHYNRYLTRRRRIEIAHALCLTREQIKIWFQNRRMKWKKESKLLSASQLSA

SEQ ID NO: 1364 - protein, 80 aa, Artificial sequence
  Synthetic
AVNPSYNGGEPKRSRTAYTRQQVLELEKEFHFNRYLTRRRRIEIAHTLCLSERQVKIWFQNRRMKWKKDHKLPNTKMRSS

SEQ ID NO: 1365 - protein, 80 aa, Artificial sequence
  Synthetic
KVGEYGYLGQPNAVRTNFTTKQLTELEKEFHFNKYLTRARRVEIAASLQLNETQVKIWFQNRRMKQKKREKEGLLPISPA

SEQ ID NO: 1366 - protein, 80 aa, Artificial sequence
  Synthetic
AKVSEPGLGSPSGLRTNFTTRQLTELEKEFHFNKYLSRARRVEIAATLELNETQVKIWFQNRRMKQKKREREEGRVPPAP

SEQ ID NO: 1367 - protein, 79 aa, Artificial sequence
  Synthetic
KLAEYGAASPSSAIRTNFSTKQLTELEKEFHFNKYLTRARRIEIANCLHLNDTQVKIWFQRRMKQKKREREGLLATAIP

SEQ ID NO: 1368 - protein, 71 aa, Artificial sequence
  Synthetic
DAKSLTAWSRTLVTFKDVFVDFTREEWKLLDTAQQIVYRNVMLENYKNLVSLGYQLTKPDVILRLEKGEEP

SEQ ID NO: 1369 - protein, 64 aa, Artificial sequence
  Synthetic
GSSGSSGVTYDDVHMNFTEEEWDLLDSSQKRLYEEVMLETYQNLTDIGYNWQDHHIEESGPSSG

SEQ ID NO: 1370 - protein, 61 aa, Artificial sequence
  Synthetic
EMLSFRDVAVDFSAEEWECLEPAQWNLYRDVMLENYSHLVFLGLAFSKPYLVTFLEQRQEP

SEQ ID NO: 1371 - protein, 20 aa, Artificial sequence
  Synthetic
GAVLMIFYWKRHDESTCNQP

SEQ ID NO: 1372 - protein, 50 aa, Artificial sequence
  Synthetic
EISECLIASSFEDDSRVASPLDQNGSFNVVIKEEPLDDYDYELGECPEGV

SEQ ID NO: 1373 - protein, 80 aa, Artificial sequence
  Synthetic
SVNPNYTGGEPKRSRTAYTRQQVLELEKEFHFNRYLTRRRRIEIAHTLCLSERQIKIWFQNRRMKWKKDHKLPNTKGRSS
